United States Patent Application Publication US 2026/0191916 A1 - sequence listing, part 107

SEQ ID NO: 703 - DNA, 2530794 bp, Bifidobacterium longum (residues 1-1,265,397 of 2,530,794)
  source 1..2530794: mol_type = genomic DNA
gtttggacaattatgtcaaactactgggggatgaaaagttctggacctcattttccaattcgttgtacatgattgtggccatggtaattattccgctgcttatcggtctgattcttgcagcagtattgttcgattatatcggtcgtgaattcggtggtaagacatcgagctttttgagggcttgctactacctgccacaaattcttcccgtcggtgtagccggcattctgtggaattggattcttaattcacagaccggcgcgattaatcgaattcttgccggacttttcggcatggataagactcctgattggctaggcgacccagatcttgcgatttatgcggtgatgctgatgttggtgtggagccagataggatatccggttgtcatcttcatgtcggcgttggggcgagtcgatcccgagctgtatgaagctgcatcgcttgatggtgccgggtggtggcggcgattcagcgccatcacgctgcctcagattaaacctgagattttcgtggtggtactgacctgcactgttgcggcgcttaaggtttttggacctgtttatatgctgaccaagggcggtccgcaaagctccacccttgtgccgtcctactattcctacattaatttcttcggtaaatcacagattggctatggagcggccatcgcaagcgtgttggcgattgtcatcgccatcgtcgcatctgtcatcatggtgttccagaaccgtagcgctgctcgggaacgtgaaggagctctgatcgtatgagcgcatcatcatctgtcaaaacaggcatccaagctcgtatgaatcgtattgaacagcgtgatcgagttaagcagtccaagacgcgcaagcctattaatctattgcgatgggtaattctcattgcatgtgtgttgtttgcgattctgattctctcgcctctgttccttatggtgctcaatgcgttcaaaacgtcacaagattacacacagaacggtccgttgagcctgcctcatgaactgtatttcggtggcttggtgaatttctggaaagcgaccgacttccccatcaagttctggaattcattgtggatttccgtggtgtctgcgctgttgtccgtggtgctctcgctatttaacgcctatgcgctgggtatcggccgtgtgcgtggtagctcagtgattattgcactgttcatgattctgaccatgctgccaggagaaggattcatctacccactgttttacatgttcaacgcggtgggcatgggcaattctcaatggaccatcgtaattatatgcggcattatcaatatggcgtttggcacatatttgctcagctcggtgatgtcgacattccccaaggagctgttggaagctgcacaaatcgacggggctggtcgttggcgcacactccgtgacgtcgtgttcccgattatgaagtcgaactgcgcggtcttgttcatcttcttcttcatttggacgtggaacgagttctacttcaccttgattttcctagtgtctggagatactcagaccataccgctggcaatcgcgtcgttgcagggcgaccgcatcatggacgttccgactatcaacgcgggaagccttatctcccttattccggcgtttgtcttcttcctcatcttccagaggacgttgacgaagggcattaccgccggagctgtgaaataaccgaacccgatgcactgttggccggtggttctcctcctctccttcccactggccatagtgtatcgatgtatctttcgcccagcgtggggcaacaatgaagaaaggcaaacaaatgaaattttccgatggatattggcgtgtgcgtgaaggctttaccgcagcatgggcccgacagacacatgacatcgcgaaaaccgataacgggatttgtgcacatgcttctgcgaatctggtcaatgggcgtggggattccttaggaggtccggtattcacagttactttatcgaccccggccgaaggaatcatcaaagtagtggaagagcattttcgtggagcggtgaatccagatccacattttcatctgaatattgatgaggatgcgaatttcgacattgagaccggggacggggccacggtgtttcgtgcgggctcgctcgaagtcgccgtctccaatcctggcgagatttggtccatggacttccgagcgaatgggcatagtctcactggaacgtcgtacaaggggctgggcgcatataccgaacagtcgaccggtatccattacatgcgtgaacagctgcgtcttgccctagacgaaaaagtctacggcttcggagagcgatttggccacttcgtcaagaatggacagaccgtggaaatgtggaactctgatgccggtacctcatctgacgctgtgtacaaagccatccctttctattggacgaataaaggctatggcgtgttcgtaaatcatagcgaagacgtgtcatttgaggtcggatctgagactgtgggcaaagtgcagttttccactaaaggacatcgacttgaatactatgtgattaatggcccggaaccaaaagatgtactacgccgttatacgaagctgaccggacgtgctccctatctgccggcatggtcatacggtttatggctgaccacatcattcctgaccgattatgatgatgccactgtagcgggattcgtggatggcatgcaggaacgagatatcccactatcagtcttccactatgactgcttctggctcaaggaataccatttctgcgacttcgaatgggatggagatatgttccgtgatccgaggggaaccattgccgagcatcaccgtaaaggtctcaaggtgtgcgtatggattaactcctacctgagttccatgtcgccgttgtttgacgaggctatgtctaagggctacttgctcaagcttcctgatggcagcgtttacgagaccgatttttggcagccgggcatgggcctggtcgatttctcgaagccggaagctcgtgaatggtactgctctaagcttgagaagcttattgatatgggtgtggattgctttaaaaccgatttcggagaatcagtgcctactgaagtggtttatgaagatggttccgattcggtcaaaatgcataactactacacgtatctgtacaacaagactgtctacgaattcttggagcgaaagcttggcaagggacaggcggtgctgttcgcccgttccgccaccgttggtggacagcaattccctgtccattggggcggcgactgcgaatcgacttatacggcgatggccgagtcgctgcgcggcggcctatcgttgatgtcgtctggatttgggtactgggcgcatgacatcggtggattcgaaggcaatcctggtcctgacctgtacaagcggtgggtgcagtttggtttgctgtcgacgcattcgcggctgcatggttcccattcggtgcgtgtgccgtgggccttcgatgaagaatcctgtgatgtactacgcaagttcaccaaattgaagttgtcgttgctgccgtatctggcctatggatccaaacaggtcagcgaagaaggcattccgctgatgcgtcccatggctttggagttccctcacgatccagcggcagaatatctggatcgtcagtacatgctgggcgatgatttgctggttgctccggtcttttctccagatggagtggttcgttattatgtgccggaaggaacttggacgaacgtactcaatggagagcgaatcgcgggtccgagatggatcgaggaacaattcgattacatgaccatgccgttgctggcgcgtccaggtgcggtcattccaatgcaggaaggacgttgcgacaccgatggggatttgaccgacgacgtgatcctgaagatttatgatccggcggcccttgactcggaatggcgccaactggtcctgcggcatggttttgaggaagatgccgctgagacgatcttccggattcggcgtacgaatgatgtgcttgaagtgcgctgcgattccgtggaagacggatgggctgtcgaatgtggcggtcagcgggttcaagcgcatgccggagccgcaacattgtcggtgcaatgatcccatagtatgcgcaagcatcgtggacgccggaatgatatctatgacggcattccggcgtctgcaatatctgtgtgaccttctgtgaccttgggcttaagatagggggatatcatgggtggataggcgatggtggtgccacgacaagatatgcgaaggagagatatgggcagccgcgtaacgattaaagacgtggccaaagcggctgatgtctccattaagaccgtatctaacgtgattaacaacactggaagaatgcgcccggacacgcgacaaagagtggaaggggccatgcgacaacttggatatacggttaatttgtcggcgcgtgccatccgttccggtggcaccaggctgataggcctgaatatcttcgacttttcgcagccgtttgctccgtatctagctgataaggtcattgattttgccaaggagcgccaatacggggttattatcaatacctatggctccgatggcactggcttggcagatggtattgaagagacctatcgcttgggagccgatgggtggattttctttactgaacgcgctcttgtcgatgacggtgctgcacttgaacagccatatcctgtggtaatggcaggcgattatctgtcttacggcaaaagtgatttggtgaccatgcctaacgtgtcagctgtacagcagaccgtgggcagattgcttgataccggagtcagagctattgctctattgggtgccccgccggggataactgattgggattctttgaaaagtcagaaagaaggcacccaagagttacgtacccagggctatgtacgggcgttcaaggaacgagggcttgacgtggactggcgatatgttattccggtccatggatggaatcagcatggtggtgtgcaatccactgcagcgatgcttgactcgttaccttgccctgaagcagtggtctgtctcaatgacgccatggcactaggtgccgttcatgagctacagcgtcgtggtttacgagtccctcaagacgtgcaactgataggtttcgataatgtgccggaagccgagtactcggtgccggcgctgaccaccatcgatcctcatatcgatgattatgccaagcatgccgttgacatgcttatcgaccgcatcgaaggatactcaggcccggcccgtacgtacaccaccgatttcacattggtggaacgtgcctcaactcgacttgcccactagcatccaacaagttcgcatcggcttcgtgaggagtgtgtgtctactcgaacaatgcggcgtcagtcgctgggtagccaagttggaacgcggtgtaggcgtgcttggcggccagtgcggcgaggatgagcagcgtatcgctctcggtggaagatttcgattcggtcacggccttgatctgcgcgcgggcgcagtccatttcgatggcggcggcggtcggtacggtttggccgcttgccttgtcggcgatggtggtggggttggccagtagttggtcgatggcatagaccttttggcgggggtcgttttggccggaagaactggattgtgcgccggaatcatcaaaattgccgttcgccagcgcaaccaactgctgcccggcggtcttatgcatatcgctcaacgccaacgtagccccagcggtctgtcctcgtgcggccaagacctcgatagcgaatccggcgcgatcctcggccacggccatcgcatccaataccgatcgatcaacgttggcggacgtgacgccatcaagacgcgccggcgtcacctcaggcgcggactgcccgaatttatcggccagaaaagccagccattgcttggtctgcgcgtcacgtaacgttccctcggcaaaacgacccgaacaatacccggcaacgtcaatccaagccaggggagcggccagaccggtggcatactgctctaataacggcgtgccttcagccggatgggtggcgtagcccgccaacgtcatcgctttctcgcaaggggtcatttgagcttctgcctcggcccgtccggccagtcgcggcatcgaacacgccgaaagcgaacacagcatcgcgctcgcgcatagtacggatgccaagcgccgggtaaaccgtcctgaagagaagcgtgtctgcatggaaacatacactaatagctaactgtgactactcataggccatgcgccacataacttcataggaggtacggatcgatggaactggacctgacaggaatacacaagctcgccgccgagcaaggaatcgaccccgaaaccctggatgatgcgctggcagaggccctgcgcctcgcctacctcaagaccccgcacgccgccaagcacgcgcgcgtggagcttgacgaacgttccggcaacttcaccgtgtgggccgccgacgaaattccggtcgaacccaccgaagacaacccttaccccgttcccaagctgggcgaggaatacgatgacaccccgcgtgacttcggccgtctcgccgcagccaccgcacgccaggtcatcacccagctgttccgccgcgccgaagatgagaaggtattcggtgcgttctccggccagaagggcaagctcatcaccggcatcatccagcaggatgcttccgacccctccaacgtgcatgtcgcgatgggcgatgtcgaagccattctgcctcgccgtgagcaggtgcccggcgaacgttaccgccacggcgaacgcatccgcgtgtacgtggtgaacgtggcccgtggcatcaagggcccggaaatcgtggtgtcccgctcccacccggagctggtccgcaagctgttcgagcgcgaagtgccggaactggtctccggtgccgtgtccatcatggccatcgctcgtgaggccggcgcccgcaccaagatcgcggtcaaggccaacaccgatggcgtgaacccgaagggcgcgctgatcggccccggcggcgctcgcgtgcgtgccgttatggagaaccttggcccggagaagatcgacatcgtcgactactccgacgatccggccaagttcgtggcagccgcgctgtccccggctgtggccaccggcgtgcaggtgatcagcgagaagaacaagaccgccatcgccttcatccacgacgaccagctgtccttggccatcggcaaggaaggccagaacgcacgactggcagccaagctgaccggctggaagatcggcatcgaatccgccgaggcccatgccaagaaagtcgccgccgaaaaggccgcccaggctgcggccgaggctgctgctccggaagccgaataggccgccgggctcgaaggcgaatgatcttcagggcgcattatttcctgatacgagccgcgtcagcaatggcgcggctcgctgcgtctacgctatccagcgctatgagtatgcttgattggcgtatgtgggctggcgcagtgtgcgcgaaatcgcccacaccagagacgaggtaacacgatcatggtcgcacgatgagacagggtaggcttgccgtcatcaccaactgaccacgcccatgcacgcgcgtggtcacagaataggagtaattagtggcgaaaccacgcgtatacgaactggctaaggttttgaatgtcgatagcaaaaccgtgcttgagaagcttaaggacatgggagaattcgtcaagtccgcttcttctacgattgaaccgccggtagcccggcgtctgaaggcagagttcgccaaggacaacgccaagggcgattccaagcccgtgcagcagcgccgcacggccgcaccttcggccccggcttccacttcatcttccgcaccgactccggccgctcccgcacgtcaggcatcgcctgcctcggcacatcagcaggctccgactccgggtgcaccgacaccgcgtccgcagggcggcgcacgctccggcatgccgacccccggccgccacggtcagaacgacaaccgtgagaatggtcgcgataatcgcgaaggccgtgagaacggtcgtcagagtcgcccgaacgatcgccgtaacaacgatcgtcgtaacaaccagggccgtccgaacaatggccagccggttcagcatcagaacaaccgcggcaatgcttcggctccgcgcccgcacgctcagggcggcgccggtgccaatggcggcaatgccgcttcaaatgcgattccgcgcccgcacgctcagggcccgcgcccgggcaacaacccgttctcccgcaagcagggtatgcacaccccgacgccgggtgatattccgcgtccgcatccgatggctcgtccgactgctgataacggtcgtggcggtcgtccgggccgtcccggccaaggccaggggcagggccgcggcttccgtggcggtcgtccgggccaaggtggtcagggcggtccgcgtcccggccagtggggccacaaccgtccgggtcagggcggcggctcccagggtgccggtcagggcggcgcacgcggcggcttccgtgggggccaaggcggtggcaataacttccagggcggcggtgcaccgagcaacggtcccgcacgtggcggcggtcgcggcggtcgcggcggtgccgcaggcgcattcggacgtcagggcggcaagtcttcaaaggcccgtaagaaccgtctggcaaagcgccatgagtatgaggagctgaaagcaccgaccatcggcggcgttcgcatccccaacggcaacggccagaccatccgtctgcgtcagggcgcgtccctggccgatcttgcggagaagatcaacgtcaaccaggccgcgctggtcaccgtgctcttccacctgggtcagatggctaccgccacccagtccttggatgaggagaccttccagattctgggcgaagagatcggctggaacatccagctcgtctccgcagaagaggaagacaaggaactgctccagcagttcgacatcaaccttgacgaggaagaactgcaggatgacgaggatctcaagcctcgcccgccggtcgttaccgtcatgggccacgtcgaccacggtaagacacgactgctggataccatccgcaagaccaacgtcatcgcacgtgaggccggcggcattacccagcgcatcggtgcctaccaggtcaccgtgaaccttgaaggcgaaccgcgcaagatcaccttcctcgatacccctggccacgaggcgttcaccgccatgcgtgcccgtggtgccgagctcactgacgtcgcgatcctcgtggtcgccgccgacgatggtgtgatgccccagaccgttgaggccatcaaccacgctcaggccgccaaggtgccgatcgtcgtggccgtcaacaagatcgatgtgcccggtgccaacccggagaaggtccgcggccagctcaccgagttcggcttggtccctgaagagtatggtggcgacaccatgttcgtcgacatctccgccaagcagaacctgcacgtcgacaagctgctcgaagccgtgctgctcacggctgacgctgagctggacctccgcgccaaccccgacatggacgcccgtggtgccaccgtcgaagcccgactcgacaagggccgtggtgccgtggccaccgtgctggttcagcagggtacgctccacgtgggcgatgccatcgtggccggcacttcgtacggccgcgtgcgtgccatgctcgacgagaacggtcagccgatggaagcggccggtccgtccacacctgttcaggtgctgggcttgacctccgtgcccaccgccggtgacctcttcctggtcgcctccgatgatcgtgccgctcgccagattgccgagaagcgtcaggccaccgagcgtgccgcccagctggccaagcgtcgcaaggtagtctccctcgaggacttcaagaagaagttcgccgagtccgagatcgacatgctcaatattgtcatcaagggcgattcgtccggttctgtcgaggcgctcgaggattccttgatgaagatcgaggtatccgacgaggtcggcatccaggtcatccaccgcggcgtcggtgcgatcacccagaatgatgtcaacctggccacggtcgacaaggccgttatcatcggtttcaacgtgcgtccgaaccgtcaggtcgcggacctcgccgagcgcgagggcgtggagatcaagtactactcggtcatctaccgtgcgatcgaagacatcgaggcatccctcaagggcatgctcaagccggaatacgaagaggtcgtcacctctcactccgagatccgcgagatcttccgctcctccaagttcggcaacatcgccggcgttatggtgcaggacggcgaggtcaagcgtggtacgaagtgccgtatcctgcgcaacggcgtggccacggtcaacgacctcgagatctcctcgctgcgtcgcttcaaggacgacgttcagtccgtcaaggaaggctacgaggctggtatcaacctcggcaccttcaacgacattgaactcggcgacatcatcgagaccttcgagatgcgggaagtcgagcgcaagtagtcattgttaagccccctctggcgagggggctgtcagccgcaggctgactgggggagagacatggtagttccatgattttctctcccctggcctcactgcgttcggcagcccctcgtcagagggggctcaagtctagaaaaggaaattcctatggcaggaaccaacccgcgcgccgcacgtattgcggccttgattcagcgtgtcgtcgcctcctccattgagcgcgaactgcatgacaagcgactcgccagcatcaccgtcaccgaagtccgtgtgaccaacgatttgcaaatcgccaaggtctactggacccagctcggccacgaaggccacgaggaaggcgaacgcaagcgcgcccagcaggccctcgatcaggccaagggccacctgcgttctctggtgggccacaaggctggcctgcgcctgactccgcagctccaattcgtgttcgatgaagtgcccggcgaggctcacgagatcgaagacatactcgccgtggccaagaagcgtgatgaagaactcgcccgtgctcgcgccaccgcccagtacgccggcgacgccgatccgtacaagcatgacgacgagcccagcgacgacttcgaagacgactctgacgaggagtagtgtgcttcatacaacccccagcggtctgctcatcatcgacaagccgcaaggcgtgaccagtttcgacgccgtcgccgccgtgcgcggcgcgttgcacatcaagaaggtcggtcacgccggcacccttgaccccatggccgctggcacgctggtcatcgccttcggccacgccacacgactgctcaacgccatcgtggcgcatgacaaaacctacgaggccaccatacgcctcggcctgcgcaccactaccgacgatgccgaaggcgaggcgcttgtcgatgacgaagcccgctcccgctggcaaacgctatcggcgcagctgaccgagggcggccagagcggcgaaccaacggcgtcaccaactgcctcatggcaaaacctgctcacacgcaccatcgccaccaatttcaccggcgatatcgaacaagtccccaatacgttctccgccatcaaaatcaacggccagcgtgcctacgacttggctcgcgaaggcaaggatgtggaactcaaaccccgcccggtcaccatcagcgaattcaccgtgctggatatccgcagcggattcgtagcaggggagcaggccgctgaaccattgcgggaagacgcgaacacgggaacgattcccgcacttgatattgacgtgcggatcagctgttcatcgggcacctatatccgcgcgctcgcccgcgacctcggcaatgaacttggcgtcggcggatacctgacccgtttgcgccgtacgcgagtcggccgattcgcgttgccggacgataccagcggacttatcgcctctgagtcgatgcttgacacgcgaacccataccgtcaccgcacataccgatcagaagacgttcactaatcgggaagggcaaaccgtcacgcgcaacaagtgcgtattgaacactcctgaaggtcttgccggtgacgagcgccgcaactggctgcttgaccatgccctcaccatggaacaggccgctcgaggcgcgatgccggcgctagacatcacacctgaggaagccagcgaattacgcttcggccgccgtatcgagcgtacaatcagcgagcccactgccgccattgtgccgcaaacgcatgatgtggcggcgattatcgagcgtgcaaacgctcatcaggccaagccggtcaccgtattccccctcgcgtaaagtagacgcggtgaaaagtgcagcttgatacaggccgcgcacaacaacgcctatattgcatgaataacatcgcacggataaaaggaacagcacactgatggatatcacgcacctgacccctgacgccgaaggttcgattgaatggccctcgttcagtaacgacaagaaggccgtggtgacattgggcgcatttgatggcatgcacttgggacatcaggcggtgatcaagcgtgtggtggaactcgcgcaccagcatgatgctttttccgtggtgattctgtttgacccgcgccccgcattcgtgcacggctgggccgcctcgcaccatggcgaggaacccgcagtgcagaacgtggatgccgaagccttgaccagtgtggatgatcgactgcaccgcatggaacagttcggcgtggaccacgtgctggtggtgcactacacgctggccttcgcagccatgtcatacattttcttccttggccgactcaccggcaagctgggcatgcgtacgctggtcctcgggcaggatgccgccatgggcaagggtcgagaaggtgatgtgaagcatatcgccaatcttgccgccgccaccggtgtattcgaacttgatgtggtcgatgaccgtggcccgggtgaagtgcgtattccgcgcgatttcaagccggaagccccgagcgaatggggagagcccgtcgacccgctgaccaatgccaccaaggccgagcgccgcgcatggagcaagaagaaccaggccaaggcaatgcgcgcatggagctccaccaatgtgcgctacctgctggctcatggccgaatccaggacgccaacgccattctgggtgctccgcactccatcgagggcgaagtggtgcacggtgaggagcgtggccgcaccatcggattccccaccgccaatcttggctccgacattgcaggctacattccggtcgacggcgtctatgccggttggctggtagatggtgagaaccgttggcccgccgccatctccattggcaccaaacccaccttcagcgagaaaacagggctcaacgaacgcgtggtggaggcctactgcatcactgacgaatggatcgacctgtacgaccacaaggttcgcgtcgaattcgtcggcttcctgcgcccgcaggtcaagtttgatggccccgaccaactcgtcgacgaactcaagcgcaacgtcgaggagaccaagcgtcttaccgcctgaggcatatctcagggctatttacgcactcccaaggcgtctaatgcgtcggacaatgtgttggactccaccagccgaagtccctcgacatgcaccggcttgcgcagcggaggaatgaccgccgtcgtgaaaccaaggcgcgcggcctcgcgaaggcgatattccatacgcggtaccgggcgaacctggccggtcagggaaatctcaccaatggcgcacgtggctcgcgcaatgggttttgacgtggcggcgctcgtcagtgccgccactatcgccaagtcggaaccaggctccttggcctggcccccggcaatagtggagatatacaggtcgttggacagcaggttgagcttgctgtgacggtagagcaccgcgaccagcatggcgatacggctggggtccacgccattgaccgcacgacggggtgtgggcagcaccgacgtggtgaccagagcctgtacttcgataggcagactgcgatgcccatccaatgtgaacgtcacgcaggtgccttccacgggtgccgcgttggccgcatcagggccgtctccagacaggaacaatccggcgggatcggtgacctcttcgatgccctcaccgctcatgtcgaaacagccgacttcatcggtcgggccaaaacgattcttcaccgctcgcagcattctcagcgcagtctcgctgtcgccttcgaattggcagaccacatcgaccagatgctccaatgtgcgcgggcctgcaatcgaaccgtccttggtcacatgaccaaccagaaatactggaatgtcaagtgtcttagcggtatctatcagcgcgcttgccacttcgcgcacctgagtcgaaccgccggaaatgccatcgacctcctgcgagacgatggtctgcgccgaatccacaatggccaaggccggcttgttctgttcgatcagccccaatactgtggacaggtcggtggtggaggccagtaacaagttcggctccaccgcattgatgcgggaagcgcgcaaacgaacctgcgcctgtgattcctcgccggaaatgtacagcacggtgttggcgtgtgttgatgatgcgttgccccgcatcggcaccgtgtttgatgtgccgccctgcgctcggcccgactgttgggcagaccgctgacctgcccctcggaacgtactgtctcccgccacaacgcgcgcgatattgccggccgtctgcaacagcaatgtcgacttgccgatacccggttcgcccgctatcagcgttactgaacccggcaccacgccaccgccgagcacacggtcgaattcggaaaacccggtaccgagccgctcgacgctttccgtgcccacttcggtaatcggacgggctgcagatctggcgttgttggcaaccgtaaccgactgcgtgcgtgatgttcggccgggagcggccgtgcgagagcctgccgccggccgagcctcgtgaaattcctcgaccgtgccccactgaccacactcggggcaacggccgtaccacttcggcccgttccaaccgcattcggaacatacatactgcacacttgatttcgccatggtctcaccctaacccaaacaccagcggacggtaaatttttaccgttcacaagagtttcacgcggcttgcgcacaacgactaaaatcacggccgcctagcgtcacgcggctgtgagagaatcggggcatgactaatagtgagaactcctcgaccacgcaatcccatggcaagttgattgcagtggtggttgccgcagctgttgtgattatcctggcagtgctttcggcctttgtgtggccgggttgggccatccagaagaatgatggcacctccactaccacccaaaacagccagcagaaaaccgaatcatccgagccgaccaagccgaccatcgacgccacagctttgccggatgatgccagtgagctgttgaaggccatgccgggcagcgtgctgaattacgcgcgtaccaaggcggatgcctccacgacgtggaattccgcgtcgccgctcgaggagtacactctgacctactccactggtgatgccgccaaggatgtcacgctggtcgccgcgcagtggtcgtcggcggacaatgccaagacccagtacgatgcgttggtcgctgcgcagaccggcgatgagtcggcatccggcaacgtcaaggtttccggcaacgtcacgggcgcgtacgtggtgaaggccgatgcctccaacagcaagaacgccgttgccatctggcagaacgataccgtggtcttccaagctaccggcaccaaggaagcggtcgatcgcttctaccagaagttcccgatgtagcatctagtatcggctgtcagctgctgcacaaacttatgaacgttggggcatccacattgctgatgtggatgccccaactgcgttcagggcatatgcggactatcggcaacatactggttccctctgtctggcaacacgtgtattatggtgcgagttgcaacttttacgattaatcgaaatggaggcttcagatgggttctgtcatcaagaagcgccgcaagcggatgagcaagaagaagcaccgcaaactgctgcgtaagacccgccaccagcgtaagtagtcttacctgcaatcaaggcattagaaaccccgtgatcgttatggtcgcggggtttctcttttgcttggctctttgccttgttcgggcaacagtaaagcccgcacctgcgatgtgcagatgcgggcttggaaaagcttagtgatgtgagacgatcacttgttggcgttggtcatcacgcgcgggccgttcgggtcgccgacgatgaccttgtcgaccatgttgaggaacaggccgtgctccaccacgccgaccgtgttgatgaggtcttcggccagctcctgcgggtgatcgatgcgctccaggtgcaggtccaccacgaagttgttctcgtcggtgcgcacttccttgccgtcggcgtcaagacgaagcaccggcttgtagccgcgggcctcgaacttcttgatgacttggccggcaccgaacggaatgacctcgaccggcagcgggaacttgccgatggtgtccacaaccttggactcgtccacgatccacacgatctggttggagttggtggccacgatcttctcccacagcagagcagcgccgccgcccttgatgccgttgaagttcttgtcgacttcgtcggcgccgtcaatggtcacgtcgatgtggtccacgtcgtcgatgtccacgatcttgatgccgtagctctcggcctgggcctgcgtgcggcgagacgtggtcacgccagtgaactcaagaccttcctcctgatgacggcggccgagctcgtccaccaggaacttcacggtcgaaccagtgccgaggcctgcgatcatgccgttttcaacgagcttggcggcttcgatgccggccgccttcttcagcgcatcctgctgtgccttatccatggtttctcctttgccatccttgcctccgccgcatggatcaacggcgtgaagccttatctcctatcctaacgcgaatgagcgattttgtgtcatcgtgtccgattgcggtacatattcgtgtgtttgggtgtcagtgtcgtacgaatggtgcgttggtgatggtcaggttgccgtcgccgtccacatagccttcgatttcgatgctgcctttgatcggcatcggctgcccgttgaaatacgggctcgttttcggcgcgggggagaaggtcagcgtaccggataccgtcagcccgctgggctttgcgggggatacgggttgcgttgattgtacaggttgcgttgattgtacaggttgcgttgattgtgccgctaagtgtgacgaagacttggtctccggccttgcggcatccgtctgatccgtcgccgcagccggcttgcgcaaacttgccgcatccgctttgccgtccaataccaattgcacgtctggaggcacatcggtgccatgtgcgtattcggagcccagcagcgactgccagccttcaatcggtagatagccgtcgcgcgcacccgaacggcaatcgcccgcataggtgcgtgccagttcatcgaccagctcattaccctcgttgccggcgtgacctttgacccatcggaaatccaccgggccagggcgttgcgagatttcacggtcgatcgcctgaataagctctttgttcttcacaggttttttctgtgaatttttccagccgttcttcttccagcctttgacccacttggtcgagcaattgatggcgtactgcgaatccgattcgatgagcaatggctcagggcccggatgcgctcgcaaagcttccaacactgcgcacagttcgccaatctggttggtgccgttggtcgcgccgccggcgtcgtagccgtggtcgtcgtgcttatggccaggcttgccgccggtgttctgctcatgatcggcccaggcccagcccattggcccgtttggattccctaatgcggaaccgtctgtggatactgtgatagtcatgttctccaccctaacgcaagctgtgcaatctcttgctgaagtggggttgcccagtgcgaggcaaaacaacgtagtggagggtgggaataacatcacacctattgactttgcttgaaaaacatgccatcgcgcgtgaataggtgagcgctcacaagaaaaacaagacatttcctctctgcgggtgaggccggcaacaatggcgcatccggtatctggaatgagaataagggactgtacaaaaccagtgacggcaacatcgaaatcctcaaaccagaggcggacagcgatggttcgacctccacggccgcatccaagggcaccatgcttatcgcaggcaactccaaaaccgtggcactcggtccaggcggcatggccttggctcccggcctgccgctcggtcttggctggttcatccgacgccgcttaggattggatgcctccgacattctggaccgtaagctcggcttgaagtaacggctggttcggacgtgattgctgtcacgtacggatcatgacgacagcgcgaaggtcctcatcggtttacgtcgatgaggaccttcgcgcgcattaggggagtctgttgcgggctgcgctacgcgggtcatgctgcgcgggcgtgctatgcgaacaaactacgcgaacaagtcgttcagtgcctcggcaatcgtcggatgcgtgaacaccatatcgcgcaacgtgctggccggcgcgtcaagatccatcgccaacttgacgatattgatcacctcgtgcgactcgacggaaagcagcatcgcacccagaatgcggccagtattgcgttccacaatcgccttcatcagaccatccggtcgccgcattacctgggccttcggcacagcggccaccggcaatcgcttgaccacataatccaatccagccgccttcgcctcgcgctcattcaatcccacgcgcgagtaaggcgtggcgaggaatgtgctcgacggcacatgcttgcggtccttcaccgtgtacggacggtcggaaccattgagctgcgaccacaccacgcgatagtcatccagcgaaatgtacgtgtgctgcgggccgccgttcacatcgcccagagcccaaatgtcggctgctgtggtgcgcagaagctcgtcgactttcacggcaccgcgttcggtgagctccacgccagctgcctcaagatgcagtccctcgacgttcggcgtacgtccggtggccaccagtaccgcgtcggtggtcaggcagaatcgggcttcagccggctcggcgaaccgcggctcgccatcgtctgatggtttcgtttgaacgtgtgacatcgtggcgtgatcggtcgggttgctagtggggctggtggttgttgtagtgtcggtggcgccggtggcgtcggtggcaccggtgatatcggtatgagcgttcccggtgccggcgggggtggaatcgcaagcttgcgatgcgccgcgagtcatacccttcaccgcaacggacaacctgacgccgccgtcagcagcaggcgcgatggccttggtatccgcgttgaacaggaacttgacgccctgcgcttccaactgtgcgcgaatcgcggccgccacatccgcatcctcgcgcggcaggaactcggcattgtgctgcagcacggtaaccgccgtgccgaaatcggcaaacatcgaggcaaactcaagtccaatgaatcctgaaccgataatcaccagtcgctgcggcatatcgtcgagatccatcagtccagtgctggtgtagacgccgggcgtagtgtggataccgggaatatccggaatgcgcggcgtggcaccggtattgatgaagatcttgctggcggtcacggcgaccgggccctcagcggtggcgatttccacgctatgagggccggtgaagtgagcacggccggtgattacggtgatgttgtcttggtcggcgagcttgtgatagttcttgtcgcgcagcatcgaagtgacgcggcgcttctccttgatagcagcctcgaacgctgcttcgcgggtttcgggagtactgttcgcgccatcccgccgcgcctgttcggcggacaaaatcagtgacttggacggcaagcatccgatattgatgcaggtgccgccgtacatgtcggcgcttgcctcggcgacgacgaccttgcggccggctgcactgagcttggcagccaaggttttgccgcccttgccgaatccaatgatcagggcgtcggtggtgatagtgggggaggtgctgggtgtgctgatggcattgggtgtgctgatggacatggttacttccttacgtattcgagtgataagagtgcgttgtgctgatgtgttgtgtgccgtgcggcgtctgttttcttctttgactgccgaagcgttatcgactgatgctggctaggggaaacgcgcgggattattagcctttgcgctcgctgaatatctgttcggtgatgtcgtggatggtggtgtgttcgagttgttcgaggcaagtgcggttgagcccggcatagatgtcgttcatcactgcgcccattgaagatgacaccagacagtcctcgtgtacgtcgcccggtgtccagttcactttcacaaaagtggtgccggtggcttccgctaccgcgcgcaaagtgatttcggcggcgggccgggccagagcgtacccgccttcagcaccctctttagtggcgatgagtccggctgaggcgagcggtcgcattactttgcgcacgcgcgccgcattggtacatatgttctcggccaggatctgactgggcaggtgtgtggcgcgatggtcaaggtagaccaatgcgtgcactgccagtgaatggtcgccgttcatgaaacgacctccttaccgagtcgatactgtagctatgatgtgtacagttatgatactgtaatcatatcagatacagttagtgtgtcaaatcggggttgaagaggtggatgactatgtgtataagtgaggtgtccacatggttatccacaatgaatgtgcgtaagtgaagctaggaccacatacctcgaatcggcttccgtttccgcacccactacccatatggtggtgtcatgaacaggatgaccgacggcatcaccaactatggagctctgccaggctctatatacgatccgcctccggaagaatcggagacagtttttgttccgcccgaatttgcgggggcattttctgctgactcgaaatacccgacttttcgcgactcgccatcgccaaacagtggtgcacatgattctgcggcggcaccgaccatgagcgaaagccttgcccagcgcaaacgcgacatggtcgcacgctgcactgaggaagcgaaacgggcgggcaagaagctgcttttcggcatgaccacttccctcgctctgcaatccgtaccgattcccgccgattgcgacctcgactcggccaagctgcacactgtatccagcgttaagagcaagcggtttcgtacacgccatgcaccactgcaaacgcatatttggaaacatgcggctaaagccgccaatgtggaaatgaaccaacacgtgtttgcgctggacctgtttcacgtatgggctcaacttgccccgtatgtttcttttgagtctctgattgtgctcggggatgccgtcattactgctacgagcaaacagccagtattggctaaggatcgtgatgctgctgcaatctatcaggatctggtgaagttcgtggagcaatttacccgattcagagggcgcccgtcctgcgttcgagcattgcctctgatatcacctggtgctgattcgcccaaagaatcagaagaacgactctctctggtggcgcatgggattccacagccggttgcgaactatgtggtgccggacgcggcttttgcatctggagctcccataacgttggacttagcgtggccagagttcaaggtcgctgttgaatatgatggcgatcatcatcgtacgagtaagactcaatggcgccgtgaccaagagaaaaggggcatgctggtcgggcggagatggctggtcttcatcgccacggcggcaagtatcgctaacgaggatactcgtgctgaattcgctttcaacgtggcgagggcgcttgcttcgcgcggtgccgtattcgagtttcatgtagttgccatgtctcttgaagagttggcgcagagcctgctgtgaccatgatgttcgaaacggactgatgtaaaggcaatatttgtacgacctgttgttgtggtgtgtgcttgatattgcatgccgttcgattgcgatgcctcgtagtgatggatttcgtgaatgactagtgttcgattgtggagggaaatgtgtcatagtggtcgattgggggtgttgtcggtgcattgagcgtggatttgcgccaatgggtgtgggacgctacgcgtgttttgccgatttttgcgtggcgtcccacggcccctcgggtaatggctgtgacgggtgtggcaggaatggcgtctttccggggtttccagtttgagtgtgtgggatggggaaaatgtaaaacgattgacttagctgttgtcccacgcttttgtgggatggcaactctggaatgggcaaattcgtcgtggcgtcccacaacgatgttaaaactcgaccatgatgcaagccgaccgaacgcttcggtggtcatctggccgctgtgaccccacaatgatgatgggaaactcggtcataatgtaggcaggcgaacgtttcgcggccatatggccgtcctgccctgcagtgatgttgagaaaatgcggtcacggtgcatgaggagaaccgttgacctgcgtgtttcagtggtcgcgaactgcatatgcgctaaaaaaagctctgcagtggattgtatgaatccaatgcagagccttattagttgcggtgaacgcgactaacgcagcgatttcactcgctcagggccttgtcgaccacgacggtggcctcgtcgagtaccttgtccagagcctcgggggagacgaaggactcggcgtacaccttgtagatgttctcggtgccggaggggcgggcggcgaaccagttgtccttggtggtgaccttcagaccgccgatcttggcgtggttgcccggtgcctcggtcagcttggcggtgatgtcttcgccagccagggtggaggcggtcacgtcgtcgccggacagtgccgcgaacttggccttctgctccagcgtggtcggggtgtcgacgcgcttgtaccaagactcgccgaagcgctcgacctgctcctggtgaagctgggccgggttcttgccggtcttggcggtgatctcggcggccagcaggtcggggatcagaccatccttatcggtggtccacacgcggccgtccttgcgcaggaagctcatgccggagctctcctcgccgccgaaggcgacttcgccgctgaacagcgggtccacgaaccacttgaagcccaccggcacttcgatgaccttcgcgttgatcgatgcggccacgcggtcgatcagggaagaggagaccagcgtcttgcccacggctgcgccctcaggccagcccggacggttgccgccgaacaggtactccacgcacacggcgatgtagtggttcgggttcatcacgccccagttcgggcagacgatgccgtgacggtcggcgtccgggtcggtgccgccgaccagatcgtacttgtcccaagcgccggcgttgagctcgtcgaccaggcccttcatggcgtacggggaagacgggtccatgcggatcttgccgtcgtggtcgatggtcatgaagcgccaggtcgggtcgacctcaggacgcaccacgccgatgttcaggccgtacttctcgttgatgagcggccagtagttcacggaagcgccgccgagcggatcgatgcccaggcgcacgccggagttgcggatcacgtcgaagtcgatgacgttctccaggtcgtccacgtagtgctcgcggaagtcgaagccctcgacgtactcggacttgatggcctcctcgtagggcacacgcttgatggacttgaagtcgccgagcagctcgttggcgcgagcggcgatggcgttggtggtctcggccggggccgggccgccggtgacggggtcgtacttaaagccaccgtcggtgggcgggttgtgggacggcgtgacaacgatgccgtcggcgaggccctcgccctcgaagcgctgggtgccgtcgaccgcacggttgtgggtcaggatggcctgggagaccaccggggtgggcacgaagtcgtcacgggagtcgacgcgcacgtgcacgccgttggcgacgagcacctcgatggcggtcttcttggccgggccggacagcgcgtgggtgtcggagccgaggtacagcgggccggtgacgccggccttcttgcggtattcggcgatggcctgggagatggcgatgatgtgggcctcgttgaacgaggtcttcagggacgatccgcggtgaccggaggtgccgaagatgacacgctgctcggggacttcgggatcggggacgaggtcatagtacttgccgataacctcatcgacattaatcagatctgctggggtggcgggctgacccgcattgtttgctaccatgttccctattctgccacgtttttcgccactttgggcactcttatgttaagagttgtcaacttttgtgcgaatcgtgtgccggttgtctagcgcttggtcatttccttctcgatttcctccagcgacttgcccttggtctcgggcaccaagcgcagcacgaacgggatggacagggccgagaacacgccgaaaatcgcgaacgggccgcccacattgttgccgaacgcatcgagcagcacgaggaagaactgggagacgatgaagttgcccagccagttcgccgccgagccgaaggaggagccgatgccgcgcacgctcagcgggaagatctcgccgataagcacccaggcgatcgggccccacgagaccgcaaagccgaggatatagaaagcgatgagaatcatcgtcggcactgccagcacggccacgtcgcccacgaagttcatcacggcgagcaccgcgagcgaaacggtcatcacggtggaaccgaagatcagcatgcccttgcgcgggaaacgatccatgataagcgtggccacgatggtgctcacgaagttcaccacgccgatgcccaccgacacccagatcgcgtcgccttcagggaagccgaagcccttgatgaacacctgcggcaggaagtagatcaccgagttgatgcccacgagctgctggaacagcatgataccgatggcggccaccagcgccggacgagcgatacggaacagttcgcgcacaccacccttggtgtcctgtgcggccacggccttgatttcgtccagctcaatctgcacctgggtctgatccacgtccttgcgaatcagcgtaagtactttgaaggcgttgcgggtgtcgcccttgttcaccagataacgcggggattcgggcagcaacaggccgccgagcagcaacaaggcggccggcaccagcgccgaaccgagcatccagcgccagtcgcggatgccgaagaggttgtggttcaggaatccgaggttggaggcgtaggccagcagaatgccgaaggtgaccatgagctggaacagcgtggacagtgagccgcgacgctccttcggcgccagttcggccaagtacgccggggtcagggcggaggccgcgccgacggcgagacccaggatgatgcgggcgcacaccatcatcgcgaatccggtggaggaggcgcacaggcctgagccgagcaggaacagcagcgcggagacgatgagcagcttcttgcggccgaaccggtcagacagtgcgccgatcgacagcgcgcctgcgcacgagccgatcagcaccgaggaggtgatgaagccggtctgagagacgctcaggccgaagtccgattcgataagcggggaggcgccggagatgatgccggtgtcgaaaccgaacagcatgccgccgagcgcgccgaaggtgaagatgaatgcgctgttgagcgggaagcgcgtggagaagccgtgcgattcggcggcttcgaggtcttcgattgcgttggctgccgcgtttgtggccgcgcccgccactccggccacgccggtttcgatggtttcgattgcggtggccgccgcaccggttgcgctggtttcctgcgccgcggatgccgtctgtttcgatacgggtgatgccgttgtcgtcgtcattgccttgtcctttcgccgttgacggaccgcgcctgttgcgtggcccctctgccgcgtgcaaggtcaggcttcgattgtctgaagtcgcccgaaaacaaaaaaagacctggaacaacgtggaattcgcatattacgatacgcaaattccacgtcgctccaggtcttgcctcgttttgagtaacaaccctgctacgcaacgtgtgtgaaagatagaatacgacttccgcagtcgcgacactccgaataggcagcaaaaaacgatgatttttgacaacgattgcaggattctgcatggtggaatgatgtcggaatgggcgctgcggcaaatacggagaacgggtgtggcgaagcatcatcgcggaacattatggcgggacaccatcgcggagcaccgtagcgcatagttgccgtttcgcgatgctttgccggcattgccgtgcttttggggcacccagcgccgataatggaacacagtggcatacggcagcaaggaggaaccgtggcgaacgcatcgaacgcaacgcctgcagtgattgcggcgcgcatcgtcgatgccgtcggcggccccgcgaacattaccagcctgacccattgcgccacgcgactgcacttcgaactggccgatgccggccatgtcaaccagcacggtcttgaatccatccccggagtcctcggtgcattcccgcgagccggcaatcgttatcaggtcatcatcggcggagcggtcgcctcggtgtacgagcagatcgttcggctgcggacggcgcgattgatgccggcagcgcaattgccatcggcagtgatgcagtcagcgtcgcagtcaacgcaacccactcagtcaatgcagcccactcagccagcgcagcccgcgcagtcagcgcaatccacacagcccacgcaacccgcgcagtccgcgccgtacctttccgacgatgccgcaccatcgcgcgatactgccaccgacgccgaacaaagttgcggcccatccaatacatcccgtcacttcacgcctcgtaccgtccgcgagtggggcagtgccgtccgcgcttgggctgccgcgtttttcgactacctgtctgactcgttccgcccgattctgggtgtactgctcggtgcctcgttggtcatcgccatcgtcaacgtgatcgttgcactcggcatcgtgcctgacggcgagacctccgccggctggatactactcaaggcgatttgggagggtgtgttcaccgttctgccgattatgatcgcctacaatgcggccaagaaactggacgtcgacccctggctcggcggcgcgattatggccgcgctgatgaccccgcagtttactggcgtgatgtccggaatgtccggaatgtccggaatgtccgggacgtccgtatccagcgccctctccggggcgattcaatgctcggccgacgccgtattcggcgccgaaacctgcaccgtgtcggcgttcggcataccgattcaactcaacgactacggcggcaacgtcttcgtgccgttgctcatggctgccgtgctcgccgtggtctaccacgggttgaagcgcgtcattcccgacagcgtacagctggtgttcgtgccattcctctcactggtcgtcgtttttgcgctcaccatactggtcatcgggcctctgggaatatggctcggcggtgggctgggagcggccacagcatggcttaacgcgcacgtgccgttcctattcgcgctcatcatcccgatgctctacccgtttctcgtgccgctcggtctgcactggccgttgaatgccctgatgctgatgaacattcaggcgctcggctacgatttcgtccaaggtccgatgggtgtatggaactttgcctgcttcggtgccaccgctggcgtgctcgtgctggccgtacgcggcaaggattcggccatgcggcagaccgcggtgggggcgttgctcgcgggattgctgagtggcgtttcggaactgagcctgtacggcatccatctgcatcaccgccgcgtctaccgctggctgctcgccggctgcgcggccggcggcgtgaccagcgcggtgcttggctggctgttcccgtccgtgctgccatccggtcagatggtccggggcgtcacgaccacggcgttcgccttctcctcgttgctgacgattccggtgtttgacagaatgtgggtgtacgcgctgtccatcgccgttgcgtttgtaatggcgatggtgctgacggtgttgttcgggtaccgtacgccgccgcgcgccacggaggcgcagatggtctcggcgggcgagaacgtacgctcgcaggatgcggtgagagggattggcgcgacatcgtcggatgcggagtctgcggaagattccccatcgcggcctgcctccgatcggactcctgactccaacgccatcctgtcgccggtcgccggccggttgatgaatctggaagcgactggcgatccggtgttcgcctcccgcgcgctgggggagggtgtaggcgtcgtgccggagacggccggcgagacggccgtgctagcaccggtcagtggcacgctgaaaaccgtggcccggaccggccatgccttcggcattaaaaccgatgacggcatcgaagtgctggttcatgtcggcattgacaccgtcaatatggatggcgagggattcgtcgtggccgtgggcaaaggcgagcggatcgcggcgggagagccactggccaccgtggatttcggcaaagtcgcggcggccgggcacagcgttgtggtggtggtgacggtggtcaacgccgctgaactgaccgtggtcacgccgttgatcggcgacggtagcggcgacgacaacggcggcgactgcaaaaccgtatcagccggcagcccgatcatcgatgtggaacaatgacgttgcgaaaggatgccatggaaatactgcgagtgttcaacaacaacgtcgtgctcgccaaaggcggcgacggcggtgaggtgattctcaccggccgcggactggggttccaggccaagccggggcagacggtcgacgagtcgaaagttgtgcgcaccttcgtgccatcggatgggcgcgaccctgaccatctggcgcagatgctggcggacattccgcccgaaatcatccgcgtggtcgtcgaatccatgcaggagaccggactgggggagcgcgagaccggcagcaccacgctggtcatggccctgtcggaccacgtggcgaatgcggtggagcgggtgcggcgcggcatcgacatcacctacccgctgctcggcgaggtgagcaacctgtacccgcaggaatacgcgcaggggcgtgcgatgctcgcatcgctcaatgcgcggctcgacgtcacgctgccggacggcgaggccaccgcgcttgccatgcatctggtcaacgccggcttcgccaccggcgacctgtcctatacgtacacgatgacgggcgtgatccagcaactgcttgacatcatcgaccacagctacggcatcacgttggaccgcagttccgtgaacgtgggccggttcatcacccacctgcgctacctgttcgtacgcatccaccagcaccagcaactgacggacgagccggcaccggtgatgaaggtgattcgtgagtcctaccccgctgcgctgcgatgcgcgcgaaccatcgcctccctgctcgaactgcgcctcgacacggatatcagcggcgacgaaatcgcttatttggcgatgcatgtcgcccgagtcaccggccacgcatcgtagtagcggattagcggattggcgaatcagcgaatcggctcgagtgtaccggtcatttcggcgaaattcgaggtggcatttgaagcagcggcctgcgcggtcttttccagcgcggaggcgtcgggcacgcgcacgatcagcgcgcggtgatccaccgagaaacggatgtggcgggtttccggcagcatgtcaccgtccacctgcgctttggccggcttttccaatgtgatttcggcactgacaccctggacctgttcgatggtcgagttcgtggacagcgggttctgttcgggcttgccgatgatcgtctggtgcaccacgtcgccgaacaggttggcccagccgaggatgccgccggtggtgtcgatgatttcgaagtccagcagaccatcgtcataggatgccgccggcatcagcgagaacatgggaatctggccgcagttgccggccatcaccgtgcggaaatcgagattcttgatggtgtgggtcgagccgtcggcgctggtgactgtcagcgtgccgcggaacttcggcgcgaacaggttcttcacgccgcccacgaagtaggcgagccagctgatgttcgccttgagctcggggttggtgtcgtcgatcatggccgcatcgaagccgatgccggcgatgatgaggaaggcgtggccgtggtcgtcctccgggtggtcgagcagggtgagacggcccatgtccaccaggcgggagccgtgggaggtggccacggtcagcgcggcgtcgatatcgtccacgggaacgcccatattgcgggcaaacaggttgccggtgccgatggggatgatgcccagcgcatggccggtgccggagacggcgctcgccaccgtgcgcaccgtgccgtcgccgccgaccgcgatcaccacgtcggcgccgtcctccagcgcctcaagcgcgcagaccctgccgtccttgtcaagctgggtgtcgtagaagcggatgcgattgagccccttggcctcgcagaacctctggatatgcagccggcgggcttcggcctgcggtttggacggattcacgatgaaggcgtactgcacctcgtcgtcccggcgcttctccagcgtctgagccagcttgcggcggcgctgcgcgcgcagggcgatgacgatgacggcgatgagcaccaccacaatggcgattgcggcgatgatcagaaacacggtgagggcaggctgaggcatggctcctattgttatcggtggggaggtcgtttgcggccatggtgcgccgtacgtgaacatttcctgcacgcaacagccccgtggggcgcgattatggttcaatcgcgtctcatctgacgaaattggccgggtggacccgtccgcggactttcccgggcttccctgtgatttccgcgtgactcccgcgcattcggccattgtcggtgtctgcttacgcggctagtctggtgcccatgcttgatattcaattcatccgtgaacacaccgatatcgtcaaggaatcccagcgcaagcgcggcgagtccgtggaactcgtcgacgaagtgctctcctccgacaccgcacgtcgtggggcgctgaaggccttcgaagaggctcgcgcccagcagaaggaaatcggcaagaaggtcgcctccgccccggcggacgagaaggccaagctcatcgccgagaccaaggaactgtcccagaaggtctccgaatacaagtccaaggccgattccgccgccgaggaatacaccaccgccatgtggaagctctccaacatcgtggagcccgaagctcccgaaggcggcgaggacgactacgtggtcgtcaagaaggttggccagattcgcgacttcgcggccgaaggcttcgagcccaaggaccacctgaccctcggcaccggcgtggccggcatcgacatgcgccgcggcgtcaaggtcggcggctcccgcttctacttcctgcgtggccaggtggcccgtatgcagatcgccatgctcaccatggccgtggaccaggccgaggagcacggcttcacgctggccatcaccccgacgctggtgcgccccgaggtcatgcgcggcaccggcttcctgaactcccacgccgacgagatctaccgtctgcgcgagcccgacgaccagtacctggtcggcacttccgaagtggcgctcgccggcatgcacgagaacgagatcctcgacctcggcaacggcccgctgcgctactgcggttggtcctcctgctaccgccgcgaggccggcgccgcaggcaaggacacttccggcatcatccgcgtccaccagttcgacaaggtggagatgttcgtctacgccaagcaggaggactcctacaaggagcacgagcacctgctggccatggagcaggagatgctcgccaaggtcgaagtgccctaccgcatcatcgacaccgcagccggcgacctcggctcctccgccgcccgcaagttcgactgcgaggcctgggtcccgacccagggccgctaccgcgagctcacctccacctcgaactgcaccgagtaccaggctcgccgtctgaacatccgcgagcgtatggaagatggcggcacccgcccggtctccaccctgaacggcacgttggccaccacccgttggctggtcgccatcatggagaaccaccagcagaaggacggctccatcgagattccgcaggccatgcgcgcctacatgggcggcaaggaagtcatcgagcccactaagtgggaggcctgagtctcatcgtgctttagctccctttaatgggggagctgtcagcgtagctgactgagggagagatcgctaatagccagcaggcgaatccaagaccgaccgcactgccgaatatcaacatccctcccttctgtataatgaatacttgcgcgtgtgaacgcgcatcaggacaggtgtctgagcggcctaaagagacggtcttgaaaaccgttgaggggcaaccctccgcgagttcgaatctcgccctgtccgcgaaccgaggcctgggcaacatgcccaggccctttttctttttctggaacctgtcttcttgatcgccaccggggtgctgatatattggtttgtgatgccgtaacatgcggtgtccccgttgatatgacgggccaatcggcgtgatccgataagaaaaggcccgacgtttgcagcatcgggcctttgcgttgattaccggcttgcgcctttaatcaacaaggttgcaagatgaatcatatcacgatgcacggtagtctgaccgtgaacgggcgcaccgtgatcgtccatgtgggcgatggcgaggcgaacgccacggttgacggcacgcacttcaacgtgcgtagcctgtggcagctctaccagttgctgagactgctcgtgtagcgtctcattaaggcgcggtgccccctagtcgggtatcgcgccggcaacctgaaaaccgataatgttggcaagtgcttgcaatttgtggtggacgattgcaagctaacgtcttggattgttgccgctatccaatatctcattaggtctaccggtggaccaaaagtacgttgctttgtaaggggagttaatgaaatgaacaaacccgcacaatcgagcatcgaatcggtttaatgccactcacctcaacgggacgcgcggtaattgttagctaagttgacaataaaagagcaaaggcctaaattagcaatcagtcatcacgctgaggtgatgatttcactaggaaggagtagagatatggtatcgcacaacaagcgcatcgtggctgctcttgccgcggtagcagcaatgggtattggtttggccggttgcggcggcagcgacactgccggcgacacgaagcccggcagcgatggcggtgtggtcaacatcacctatatgcatcgtctgcccgatcgcgaaggcatgaccttggtcaacgacattgtggccaagtggaacaaggagcacccgaacattcaggtcaaggccaccaagttcgatggcaatgccgccgacatgatcaagaagctcgagaccgacgtcaaggctggcaatgcgccggatctggctcaggtcggttacgccgaggttcctgaggtcttcaccaagggccttctgcaggatgtcaccgatgaggccgccaagtacaaggacgatttcgcttccgtcccgttcgcactgatgcaggtggacggcaagacctacggtctgccgcaggacaccggcccgctgacttacttctacaacgccgctgaatttgagaagctcggcatcaccgtgccgaagaccgctgacgagctcattgagaccgccaagaagaccgctgcccaaggcaagtacatcatgaccttccaacctgatgaggccatgatgatgatgtccggccaggccggcgcttccggtccgtggtacaaggtcgacggcaactcctgggttgtcaacacccagactaagggctccaaggccgtggccgatgtctaccagcagctgatcgacaacaaggccgccctcaccaacccgcgttgggatgcatcgtttgataactccatccagtccggtcagctgatcggcaccgtggccgccgcttgggaagccccactgttcatcgattccgccggtggcactggtgctggtgagtggaaggtcacccagctcggtgactggttcggcaatggcaccaagaccggctccgatggtggttccggtgtggccgtgctcaagggttccaagcacccggccgaagccatggagttccttgactggttcaacacccagattgatgaccttgtctcccagggccttgtcgtggccgccaccaccgcggatgccaagaccccgcagaagtggtccgactacttcagcggacaggatgtcatggctgagttcaagaccgcgaacgacaacatgggtgacttcacctacatgcctggcttctccgcagtcggcgctgcaatgaaacagaccgccgccaaggctgccgatggttctgccaaggtttcggatgtgttcgacaccgctcagaagacctcggtggatacgctgaagaacctcggtctgtccgtcaaggagtgacctcactaggtcttgtcaacgggccggcttgaaatagccggccgtccaagacctccgatgcctcgcatcaccatagcggaaggccggggcgcatactccggccttccgtattgtttgggggtattgctgcaggggcgctgtggcccttgtcatttgttttactgttctttgcgaagacaggttttgtattatgactgcatccactactcaggcgaagggcaaagcacctaggcgtgccgccgccaagccgaagcggtccggcgctcagaagcgcgagaaccgcaccggctgggcgttcatggcaccgttcgccgtcctgttcgctttcgtgttcatcttgcccatcatctgggccatctattccagcttcttccgtcaggtcaccgagggcggtggcgcatacggcggtggcgagctggtcaataaattcgtaggattccagaacttccagtatgctattacttccggcaacttctggtccggcgtcggcagggtgctgctctacaccctgattcaggtgccgatcatgatcatcgccgcactggcgttggccatcgtcatcgactcgttcgtggtcaagcatgtcaccggtttccgtctgggctacttcctgccctacgccatccccggcgtcgtggcctcgattatctgggtctacctgtacaacggccaaatctcgccgatcgtcaagggacttgccgccatcggcgtcaatgtggacttcttcaacaagaacatcgtgctcggctcgatggccaacatcaccacatggaccttcaccggctacaacatgctgattttccttgccgcactgcaggccatcccgcatgacctctatgaggccgcccgtatcgacggcgccaatggttggcagattgccacgaagatcaagctgccgaacgtgcgtggcgcggccctgctggccatgctgctttccatcgtcggcaccattcagctgttcaacgaaccgcagatcatgtctacggctgatccgggtatttccaagtcgtatacaccgatgatgatggccatgaacacttctcagggcaccattaccccgtctggtgacggtccggcctcggccatcgccattgtcatggctctgatcgcaggtgtgcttgccgtgctgtacaccttggccgaaaggaaggtgaacgagtaatgagctccgcaaccgttgaagagcgcgcccgcaaaaaggccgagcgcaagctcgagaagcagcgtcaggctgcgcaacacgatttgcctcgctccatgcgaccgtccgcggccgtgaagaccctcaccgtggtgctgctggtactggtgttgatttacttcctgttcccgatttactgggccatcatcgcgtccaccaagacaccggcccagatgaccggtagcaacggcatgtggtttgctgtgccgcttgaccagctgcccaatgccatcgccactaactattccaagctgcttggctggactcgtggcaacttctggcgctgggtgctgaactccctgatctactcgggcgtctcggcattgatcggcaccatcgtgtctgtgatggctggctacgccactgcgaaattcaacttccgcggcaagaacgctgctattggcgtcatcatggcttgcatgctgatgcccgccgcactgctgaccatcccgcagtactcgattttccacaccctgcacctgaccaacactatgctctcgatcatcatcccgtgctgcgtttcgccgttcggcttcttcctgggccgcacgtacgcacagagttcggtgccggacgaactgcttgaagccgcccgcatcgacggcgcgagcgaggcgaggatcttcttcaccatcgtgctgaggctcctggccccggccatggtgacgattttcctgttcctgttcgtggccacgtggaacaacttcctgctgccgttgatgatggtgtcttccgacaccttgaagcccgtgaccctcggtctgtacggcatggtctcgctggccacgttcaccgatcgcggcgccctgatgatgggtgcgttgctcggcgtgctgcccgtgatcgtgctgttcctcggcctccagcgctactggcagtccggcctcgccgccggtgccgtcaaaggctaaccaatccgctgcccggcatgtcgtgtcactccttccggtgccgggcaacgtccctcccatattcagtgacacgattccaatcgtccggcgtcaccgtaagcgtcaaggatctacgcagtcagggtcccagggcccgcgatgacgccggtcattttgtatgcgacgaattcgtcgctttgtagttttttgatgaccaaccccacaaaggagcactcatgaccagcaccggccgcttcacgctgcccagtgaagagaattttgccgaaaagaccaaggaactcgccgaattgtggggtgcggacgccatccgcaactccgacggcacgcatctggacgaggcagtgctcgctcttggcaagaaaatctacagcgcctacttcccgacccgcgcccacaacgagtggatcaccctgcacatggacgagaccccgcaggtctacctgctgaccgcccgtatcctggccgagtccaacgcggtggatgtgccgctgatggacggtttcttcgaggaacagctcaagcctaaccgtgacgccgaccctcataagtactgggaagtcgtggaccgcaccacgggcgaggtcgtggacccgtccggctggacgctcgacccgggcgaggacaccgtgcacgtgaccgctgccgtgccgatgcacgaatacacggtgagtttcctggcctacatcatctgggacccggtcgagatgtacaaccacctgaccaatgattggggagacaaggaacacgagattccgttcgacatctaccatccggccacccgcaagttcgtgttcgatacgttcgagcagtggctgaaggacagcccgcaggtggatgtggtgcgtttcaccacgttcttctaccagttcacgctcctgttcgatgccaagcgtcgcgaaaaggtggtcgactggttcggttgcgcctgcaccgtgagcccgcgcgcattggacgatttcgagaaggagtacggttaccgtctgcgtccggaggatttcgtggatggcggtgcctacaactccgcatggcgcgtgcccagaaaagcccagcgcgactggatcgacttcctctccggcttcgtgcgcgaaaacgtcaagcagctcgccgacatgtcccacgccgccggcaaagaggcgatgatgttcctcggcgaccagtggatcggcaccgaaccgtacaaggacggattcgacgaactcggcctggacgccgtggtcggttccatcggcgacggcaccaccacccgcatgatcgccgatattccgggcgtcaagtacaccgaaggccgcttcctgccgtacttcttccccgacacgttctacgagggcaacgatccgagcatcgaaggcctcgacaactggcgcaaggcccgccgcgcgatcctgcgctcgccgatcagccgcatgggctacggcggctacctctccctggccgccaagttcccgaagttcgtggacacggtgacccatatcgccaacgaattccgcgacatccacgaccgcaccggtggggtggccgccgaaggtgagctcaacgtggcgattctgaattcctggggcaagatgcgctcctggatggcgttcaccgtggcacacgccctgcccaacaagcagacctactcctactacggcattctggaatccctgtccggcatgcgcgtgaacgtgcggttcatcagcttcgacgacgtactcgcgcatggcatcgatagcgatatcgacgtaatcatcaacggcggcccggtcgacaccgcattcaccggcggcgacgtgtggaccaacccgaagctcgtggaaaccgtgcgcgcctgggtgcgtggcggcggcgcgttcgtgggcgtgggcgagccgagctcggcaccgcgcttccaaacgggccggttcttccagctggccgacgtgattggcgtggacgaggagcgctatcagaccctttcggtggacaagtatttcccgccggtggtgccggaccacttcatcaccgccgatgtgccggtcgacccggcggcccgcgaggcttgggagcaggccggctaccgcatcccgctgagcggctgcggcggcggccagtccatcaagccgttgggcggcatcgatttcggcgaacccgtgctcaacacgtatccggtcaatgaaaacgtgaccctgctgcgcgcggacggcggccaggtacagctcgcgaccaacgattatggcaagggccgcggcgtgtacatctccggcctgccctattcggcggccaacgcccgactgctggaacgcgtgctgttctacgcttcccacaacgaagacaagtatgcggcctggagctcgtccaatccggaatgcgaagtggcgcacttccccgagcaagggctgtattgcgtaatcaacaacaccgatcagccgcagaagaccacggtgactttggccgacggcaccaccgaggacttcgacctgcctgacagcggtatcgcctggcgtgaagcctgatcccgcgttttggagaacggacccatcatgactgaaagcaatgaagttttattcggcatcgcctcgcattttgcgctggaaggtgccgtgaccggtatcgaaccttacggagacggccacatcaacaccacctatctggtgaccacggacggcccccgctacatcctccagcagatgaacaccagcatcttccccgatacggtgaatctgatgcgcaatgtcgaactggtcacctccactctcaaggctcagggcaaagagacgctggacattgtgcccaccacctcaggcgccacctgggccgagatcgatggcggcgcatggcgcgtctacaagttcatcgaacacaccgtgtcctacaacctcgtgccgaacccggacgtgttccgcgaagccggcagcgcattcggcgacttccagaacttcctgtccgaattcgacgccagccagctgaccgaaaccatcgcccacttccacgacaccccgcatcgtttcgaggacttcaaggccgccctcgccgcggacaagctcggccgcgccgccgcatgccagccggaaatcgacttctatctgagtcacgccgaccagtatgccgtcgtgatggatgggctcagggacggttcgattccgctgcgcgtgacccacaatgacaccaagctcaacaacatcctcatggacgccaccaccggcaaggcgcgtgcgatcatcgatctcgacaccatcatgcccggctccatgctgttcgacttcggcgattccatacgctttggtgcgtccactgctctggaagacgaaaaggacctcagcaaggtgcatttcagcaccgagctgttccgcgcctacacggaaggcttcgtgggcgaactacgcggcagcatcaccgcgcgcgaggccgaactgctgccgttcagcggcaacctgctcaccatggaatgcggcatgcgctttctcgccgactacttggaaggcgatatctactttgccaccaagtaccccgagcataatctggtgcgcacccgcacccagatcaaactcgtgcaggagatggagcagaaggccagcgaaacccgcgccatcgtagccgacatcatggaggctgccaggtgagccgtcagccgaaccatacccgaaccagcatgatggaggcagagcaatgaacgatcagctgaccgaggtatacgccagcatcgacgccctgatcgattatgccttggcccatcttgaccttgacccacgcaacgcagactggacccgcaaccaaatcttcgccctcttccgcctagattcctaccccggacccaaaaccacaacgtcggcggcgtcagtgtcagacgtagtccaagacattgttggcagccgaagccaggccccctatggcgaaaagacccccgaccccctgctcgccgccttccgcgccgccgccacaaccgccggccttttcaagccggaggaaggcccggcctacgccgacaccatcatgggcatcctctccgccaaccccgctgatctcgacgaccgattcctgctcgtcgagcaccgggatggcggcatggccgccatgcaatggttctacgactactgtgtggccaacaattatgtcaagcgtgcccagctcgaccggaacccgcgcttcgactcgcacgggctgacggtgaccatcaacctcgccaaacccgaattcaagaacatgaagaaggcggcggccggcaacgccgtggccggcggctacccgaagtgcacgatctgccatgagaacgagggcttcgccggacgtgacaagcgcacgctgcgcaccttgccggtcacgctcggcggcgagtcatggttctggcagttctcgccctacggctacttcgaccagcacggcatctgcgtgaacaccgaccacacgccgatgcatgtggaccgcgacaccttcggccatctgctcgacttcgtggaccgtttccccggatacttcctcggatgcaacgccgcgctgcctcgcatcggcggctcggtgctcgcccatgaccattaccagggcggcggcgaactgctgccgatgcacaaggccgccacttgggccgccttcacgctcgccgactatccggacgccgtggtcgaaatcctcgactggcccggtaccgccgtgcgtgtggtgtcgaagagtcgccagagcatcatcgacgtatccgacatcatccgcgaggcatgggtcggttatgacgacgcggcgaacggcatcgccagccatgacgcggacggcaaccgccaatccgccctctcgcccagcgcgatcatcaccgaacgtggctatgagatgagtctcatcttccgcaacaatgcgatcagcgacgagtacccggaaggtattttccatgcacaccccgaatactggccggtcaagcaggagccgatcggactgatcgaggcccaaggcttgttcattctgcccggacggctcgtcgaccagctcggcattgtcgaagaggcgctcgccgaaggccgcgatttgcccgatgaagtcagcgaattcagtctcgaatggggcgaactcgctgaaacgttggccggaaaccacgaccgcgaggccatccgccaagccgtacatgacgagctcggcagcgtctgctaccgcatcctcggcaacacggccgtcttcaagcagaaagccaccacgcaaacattcctcgaaagccttggttttgccgctaggtgaaacaggtcaagtgaagtaagctcaatactgaaggaaaaaccgaaggcaagtccttccaaaggagggaatatgactactgttctggttacgggcggtgctggattcatcgccacccacaccgacatcgaactgctcaacaagggctacgacgttatttccgtagataactacggcaactcgtcgcccgtggcgcttgagcgcgtcgagcaaatcaccggcaagccggtcaagcgttatgacggcgacgtgcgcgatgaggcgctcatggaacgcgtcttcgctgaaaacaacatcgactgggtcatccacttcgccggtctcaaggccgtgggcgagtccgtggccaagccgatcgaatactacgacaacaacctgtactccacgcttgtgctgctcaaggtgatgaagaagcacaacgtcaagaagatcatcttctcatcctccgccaccgtgtacggcacgccgaaggaactgccgatcaccgaggagacgccgaccggcggcaccaccaacccgtacggcacctccaagctgttccaggagcagattctgcgcgacgtgcatgtggccgatccgtcctggaccatcgtgctgctgcgctacttcaacccggtcggcgcgcacgagtccggcctgctgggcgaagacccgaagggtattccggcgaacctcaccccgtacgtggccaaggtcgcggtcggcgagctcaaggaagtccaggtctacggcgacgactacgacacgcccgacggcactggtgtgcgtgactacatccacgtggtcgacctggccaagggccacgtggccgtcattgaccacatcgacaaggaaggcgtgttcgtctacaacctgggtactggccacggctactccgtgcttgaggttatcaaggcttacgagaaggccgccggtcatccgattccgtacgcgatcaagccgcgtcgccccggtgacatcgccgcctgctacgccgacgcttccaaggcggagaaggagcttggctggaaggccgagctgaccatcgacgacatggccgcctcctccctcaactggcagaccaagaaccccaacggtttccgcgacgcggagtgatatgagcagatgagctccctctgatgagggagctcattgtcgtttcatcacacaatgcgcctatcggcggcccagcgggtgagctcggtgcgattcgaaagctgaagctttcgcaacaccgagctcacgtgcgtttcgaccgtcttgatcgaaatgaacagttcggccgccacctctttatacgtgtaaccacgcgcgatcagccgcatgacctcctgctcgcgggcggacagccggtccagctcctcatcatgagcccgtgccgcaccatcagcgccgccatcagaccccgccgccggcacaccctggaaggtcgaaagtacaaaaccggccagttttggcgagaacacggcatagccctcatgcacctgcttgatggatgaaatcaaatcagcgccggtaatcgtcttggttacatagccctgggcgccggcgcgaatcaccgaccccacatcctgcggcgcatccgaaaccgacaatgccagaaacacggtagtgggggagtagggccgcgatttggcgaggatctcggcaccgccgccaccctcgccgccgggcacatgcacatccagcaacaccacctgcggcttggtctgtgcgatcatcgccaccgaaccgggcacgtccgccgcttggccgacgatatcgaaggaatcgcgcaacgtggcgattacgcccgcacggaacatctcatggtcatcgaccatggccacacgaatcttggctgtctcgttctcgctcatcgatgttctccctgcgccgctttcagcgcgatcggcatatgcattctgacctcggtgccccagccggccctggacactatctccactgtaccgccgcgccgtttgatgcggccgataatcgattcgcggatgcccagccggtcgggcggaatggcgtccatatcgaagcctttgccatggtcgcgcacgaacacttcaaccatcgtgtcgctggcctcgcaatacacagacaccggctcgccgccatgcgtgaccgcattgaccaacgcctgacgggtggcgtccagcagcgcatcggtctgggcgctcggccgcgcgtcgcccacggtgaccacctcaatcggcttgccgtgctcgtcctccacctcggcggcgatctgcttcaatccggctcccaccgaacgatccgatgtggaacgttcctgatacagccattcgcgcagctcgcgctcttggctacgcgccagggcgaatacggtggtcggttcctcggagttcagctgaatcagcgccaacgtttgcagcacgccatcatgcagatgggcggtcatgtccgcgcgctcctcttcgcgctccttcaatgcctgctcgtgggtgagtcgttgcagcatcgcgttcgcccacggcatcaccgccaccacgataccgacgatcatcacgaatccgctggcaacaatgcgtcgaggagaggtgccccacccaggaatgctgacattatgcacatacaatgcccatcccatgaaaatcagtgcgatgccgcccaacatagacaacagctgcgtgcctcgcggactaagattcatccatgccagtgcgatgccgcccaaccctaccagcagcggaaacacaatctggacatccgcaccggtgctggtgagcaacagtccagtggccatcaacgcgaaaccggccaatgccacgacggccggtttcggagcacgttggatggcctcggacaatgattccggtgcggcagccgattcgtcgtcatgagcggcaagtggctgattgcctcgcgcaagcggcgcctgattaacgggcactgtgcgagccgcagccgccaccgggtctccggcaggcatgaacacccacaggaatacataagcgatgatgcctgcgccgtagaggacggtcagtgcgatgaacgcaatccgaacccatgccacgccgatgcccaagtgcagggcgatgcccttgcacacgccggtgagccaacggccctgccgggggcgcatcaacggcatgcgcgcgggcagcaatggttcgggagatgacgtcatactcctattgtgccgcgctcagggcgttgcggccggggttttacccggtgttcagggaacaatcagggtgttccccgagcgttgtggcagtggtcgggcggtgtaatggaatcatgagcaatccaaacgcgaatccatatcagccacagccgcagcctggtccgcaaaaaaacaagacatcgcgacgcttcttcacttgggtgcgatccagtggactggttcgcggcgacgaccggtggatcggcggcgtatgcagcggcatcgctttacggcttggctggagccccacattagtacgtgcgttggtgattgtatgtacattgttcttcggttttggcgcagctctgtacgcactcggctggtttctgatgccggatgtacgcgatgggcacatcttggccgaggacctcattgccggccaatgggactggaattgtctgggatgcttcctgttcctcgccgtggcaatcgtgattccaggtgcggggtggggttgtattgcgctcgccgccttagcgctatggctgttggccaaaagcggcattcgccagcaggaagggtacggattcggggcatctgcgccgcgaccggtttcacagcctgtgtcatatccagctccacagcctgtctcatatccagccgcgcaaccagtacctcaatctcctttgtattcagctccgcaaccttttccacaacctgtttcacaacctgtttcacaaaccgcgcctagtgtttcacagcctgtttcacagcctgtctatcagtcgatgcccagcgtgatgccgggtactgtgcccggcgcgatgcccggcacagtacccaacgggccgtttgcccccgaccgtatgaatgcgacggcctatgcccccaccgagtccaagcgccgcaagccggcgggcccaatcgtggtcttgagcatactgggccttaccttcctctcctttgccggtctgatgggactgatttgggtaaacgacatgggcattatcggcattatgcgtctgggcaccatctggattgccgcagtatgcatagtgatggggctggtggtcatcattctcggattcagaggacggcgtaccggtggtctgattcctctcggactggttgccggtggatgcgcgctctgcatgaccatcgtttcaggcacgtatggcgtgtactaccgtgatcttggtgccagcggcatcaatactgttgtttcactgagccaatctgtcagtgcgagaaacagcgacggcatgaacgatgtgcaaaaggatggcatcttcgttgccgatgccagcgatgccacgtttgaaacattgcagcaaggtgtggcgttcagcggtgaaaactacaacaccgatcaggcaatcattgattggtccgattgggacaagacacatggaccgcacacggtgaagatgctggatggcaaaacttccatcagtaattgcccggtcggtaccatcaccatagccgcaacacaggcgcaagtgcatatcgttctgccggattcctgcacttacgccttcggcaccgccgactcctactactccacttcgagtgacgttggcggcaaatacgagatggtatacaacaactacatgggtccaagctttgttttcttcgaagctgaaagtgccaccaatgggcctgatcacgaatggttgtataaggaatccgccatgccggacaacggcccagaattaaaaatcaatattccctatgtggtggaagcacgtgtcaacgtggtgtacgcctccgattgggaaggctctacgttccagccgcttgccgatatatacgacggcaacagtacaagcaagaacacaaccgaacaatcggaatgatcaagccgttgcaactaggagatggaatcatgactgatgaaaccaaggaattcgcctccatcgaggatgcgacaccgaccacggccataccttccgaaaccgacgcgaccaccgcgaccacaaccatggtgaccgtcgatgaccgaaccgataccacggtgctgccatccgcagcggatgatgacgaaacggctgtgctgcccgtccccgacaatcatgcggatgcgtcggtctcggatgtggatacgcaggcaacagctgcctctccatcgcccatcgaaccaaccacagatcggattgccctggaaacagttgccgatgccgtggagggagatggtgggccgattccatctgccgatgatgtgccgatgtacgcagcatcttcagcacgacctccctatgggcagtctcagaccgccggcaaaccatgccagcctggggggagcgccaagaacgtccagagcgccaagaacgtccagaatgctaaggatgtcaagagtgccaagaacatccagaaacagagcaccagcgcgcctactgtggtattcggactattaggcgtgattatcggcgtgatcgcgctggttttcgggtacatatctccggatcggatgatttcgttgttctcgccgaatccgcaattgctgacggctattatttgcgccgtagtgggactgattctggtaatagtggccgttgtatgggccatagtcggtgccgtcaagaagagaaaatagcgttacaaaccattgcattacggtcccagtagaagcacattatgacgggagccgaccgataagagccgaccgttctatgctgatggggggaggcatagtaactatgaagcggatttcggtgcggcgggtagcgagcgtcatcgtcaccgcgatggcgatgacgctggtattcgccacacttggctgggcgatgatgccgcaatggaacacacggccctacaccaagcacatcgttatcgcttctgccgacaccaccatcacccctgcccatgcgaacattccccacgaggggcgatatcgtacgcgtgaaacccgactatccatcaagaccggcgacggcgtcacgctacccgccgtactacgtgaaccggtcgacgctcccgggccacgcccggcttgtctgttcattcacgggtccggtaccagcggtgccgaggatttcggcgatatcgccaacgccatggcctctgccggcatcgtgaccttggtgccggccaagcgcaacgacaactacaccgtgctgcatcgcgactacccgcgttttgctcgcgaatacgggcgttcgctcgacgtgctgcgtggcataagcggcgtggaccccgccaaaaccggcatctacgccgaatccgaaggcacctggatcgccacgattctaacctcgaaacggcaagacattgcctttgccatacttacatccgcaccggtgttcaatggacgtgagcaaatggccatggctgtcagcgcctatacgcatgaggccggcgcgcccaagcccgtggtcaaagacatggccaaattgatgtcgctggactacgcgccattcgatctggcctatgccgactttgatgccgaccggtatctgaaatccctcaccatgccggtgctggtgaactacggcacctacgatacggccatgcccatcgaacagggggcgcagcggatcatcgccacggccaacaagtccggcaacgagaacgtcaccgtacgctatttcgccggcaaccatcagatgcgggctggtgagggcttattcaccccgaacctgccattggccgaaggctatacgcaagcgctggaaaattgggtgaacggtgtgactgccggaaccaaagccgatggatgggcaacgccccaagtcgccggtgcaacacctcaccagcgcttcgccgcgtcgcaacgtaccggatccggtatcgtcggctcgcttggcgtgctggccggtctgatggtggcagggcccgtgctgatcgtgatggcggcgatattaggtattggcttgactgtgttttcttggctacagacgttgctggccgggcgacgtagtgtggcgactgtgcgggccgtgcatgcgacgccgagtgagctgggggccgcccagcggcgcatgttgcacggcattgccggcttatctgccggtatcggcacagcggtgatggtgattaccgtgctgttgtatggctatatgagcgccgtaggcgtatcggctgtattggttatgcctcaaccgcggctgtttgccgtcggatgggtggtgctgcgaatagcgaccatgctgttggtggtgctgtttgcttgggaaatggaacgtgtctggtattgccgcgccgatatcgtcggtgtgcggcgcgtcatatgcgtgatggtagcgctcggcactctcgccacactgatgacactggcattttggggcctattctcgctgtaattctgccgatgtgcgccggtcaatggggcctggcgggcaggctgcgttggtggtctgggtgtggggcgatcggcagattgcgttggcctgggtatggccggccgacgtacatcagtcggggtgtccgatacacagtgaatggctgagtattacgcttgggaggcttcggcctcctctaaggtgtcgaaaccgccgagctggactgtgtgcaacaaggtttcctcagtgatattgcgttgcgggctggctgcggcgcgctcgccaatcatcgcttcgtaacgttcgaaggtctggtcggaatacgtaccaagctcgccgcgcagataggtttcgaatgaggtggcagatggtgtgtcttcggtggtggtgagtgcgcgcatcgcctcgccgagcttggggtagcgctcgcggaaatccttggcccaggcgacctgctgggcgatgacctgttcctgacgggccgcgcgctcttcagagagacgcggaatatacggctctatgttcttcgtgaaattttccggtgcggtggaggccatcatgcggccgtatttttcggtcacgaggttgcggcccacgtggtcggccgcgtcaagatcagcggcatagctggtgagtaatggccgctcccatgtgaggaactgggccaaccgcatctggtggaacaccggccagttgccttggcatgccgcgcgtccaccctcattgttggtgcgctggaactgatcccattcatgacgcacaatagcctcgcgcagttcatcatcagtcagttcgttggtcatcgacgttcctttcactgatacctccctctgatgagggaggtggcacggcgaagccgtggcagagggagcttgaatctacaaacttttaagcaccggatcatcagaggcgatgtggtcctcgacatacgggcgctgccattcgaggaaggtctcgccggacgtggtcaggtgttcgcgtttgagttccttgacgatatccaccgcaatctgctccacaatatcgttgattttctcgattgctggagccgcgcccttgccgccttcgccaaatccggccccgccatagcaggctgccgaactcaatcgcatcacggtttccaactgttcgcccacgttcggcaacagcgcgaacatcgagccagacagcttgcgcaatgctgcgaactgccacttgtaatacggcatatagcccaccaccatcggcacgttaaccaggaacaccaacgaggcggtggcctgcacgaactcgtggatggacagccatgcggccgcgccgtcgccgcgcttcaacgaacgcggcagattatattgaccggcctgggcgatcatgccgagtcgcttggagatcagcgcgagccgcacatcgtcgggcatgttcttgaacccttggcgcgtcttggaaaacagaccggtgggatcggcgaacacctcgccattggtggcggcggccaaggtcgattcctgaagcattagccactcatgcggcgcggtctgcgccggcgcagtgcgatacccggtgatcgactcaaagaagtcaccgatgcggaacacgccgtcacggcgattcgcgccctgtgcgcgcggcgtgacgggggagagcggtgcatcaatcggagtcgtcatcgcttccgccacatcagaggacgccgcgcctgactcggcagtggcggtatcgtccgtagcggtgccgggggtgggtgcgtttgccgcatcgggtatgacggtggagcctgcacctgcggaggggaatgctccggaagcatcggacctggcatgcgcctcgaacgtcacgcggccttgcgcatccacgctgaacttgcgcggcagtgcctcgtaatcgacctcaagttgctcgccgatcgccgcgtaatcctcatccgtaagccacaggcagaagcgcgggccgaaatcgtggtcctgcgaatacgcatcatcgaatctgtagcattccgagccatgacccaccagaccggcggcgatacgcccggtatactgcggatacttcgccgcaatcatcggcttgcccatctgcgtccagaacgcgcgggccagcttcagtccggacaccgggcatgcggaaacggcctcggccgcgtccgcagaaccggtcgacaccgaaacggtggatggggaagatgccgcgttcgcaccggtcttgccctgtgccgggctgttcggcagccgcgagccggactggggcagcgcgcctgcatcgccagcaacacccgcattgtcaaccgtcaccccggcctgcgccgccgcttcctcggcctgccgcagattgtcggcggtgatacgccagtaatcggtgttcttgccgtaacattcctcgatcacggccagcgcatgccggtatccagtaaccgcatccgcataccgtctctcggcaaagcacacctgcgcgaagcccgccagtgcggaggcataatgcgcggaatgttccagatggccggtgcgatagatttccagcgccttggctgcatgccaatgcgcgtcctccaacttgtgttcggtcagcagagtcaacgccagattcgtgtgcgagctggccacgtcgatatccgcgtccgggttcacgctcgaggcttcgataatgcgcagcgcttcacgcaactccagttccgccttgtcgggccgattcgtctcgctgtagagcatcgacagattgttgtgcagtgctgcgagcctacggtcggtgggtgccagcgaatgccggcagacactctgcgcctgatgatacaaatcctcggcctgatcgtattgtttggccgcgcgcatcgaggtggcgcaattgattagcgtggtggcccacgcctcggatgtgccggtggtcaagcccatacgagcggccagttccagcgctcgctgcacaatccactgattctccttgtgccgaccttgcgagcgatagaagcccatcgtttcgttgagcacggtgagcagtccggcctcgtcgccggcgttttccgcgtccaccatcgcctgttccaagtatgggccggcttcggtggcagccgtgtggcgatcgaaaatcgcgtccagtccgttcaggaattgttgggtatcaaaggttgcgggcgattgatcggcatcgtccgcaacctggttcgccgtggaatcggcaccttgtgctgcggccgccgcatcggtgtcgtcggcatcgtctggaccatgcgcgaattgcgcggcgaattgtttgagcagtgcttcctcatccataccgccagacctccctgaatcgtgtctgatttcagtctattaatactgtgaacaaacacgtcagggagtttgctgtgagcttggtctcagtccaccttggtttcgcgcatgcggtgaatggcgtcggtatcggtttcgcagcgccacgagtagaaggccagcagccctacggcaagcagagccagcggcataccgcccaggccggtatagcgatagttcatcgagaaggtggtgagcatcgcgccgccgacaatcgagccgatggcattgccgaagttaaacgccacctgtacagccgcgccggcgatcagctcgccgccgccctggccggcttcggtcatcagcaattgctgtggagcggaagtaaagaacaatccgatggcgatccagaacgtcagtacagcggtcatcggctgattacccggagtgataagcaccagcaacaagccgaggcaggagatggactgacctattgcggccgcgccggcatgcctccaatggtcggtcagacgacctccaagcagaccgccgatgaccataccaaagccggcaagcatcatcagcatcggcaccagggaagacgaccatccgccggttttctgcagccaaggggagacgtagctccaccagcagaacacaccggcattgccggtgaacacggcggccaaaatcacccacgggccacggcgggtgaggaacttgaactgaccggcgatgcctgcgtccttgatcggtgcaacgtacggaatccacgccaacgccagcacaattgtcattgccgcccaagcggtcaaaatgccgaaggcaagacgccaggaaaggaactcggccatcaaggtgcccgccggtacaccgagcatattggccacggtctgtccggtgaccatcacggatacggcctgcgcctccttgcctttctccgccagagtcttggcgatgagtgtggctgtgccgaagaatgcgccgtgcggcagaccggcgacgaatcgtgcgacgaccagcatggcggcattgacagagaatgcggaagccagattgcccaccaaggcaatcaccataaacaatatgatgaggctcttcggcggcaccttgcggccgaataccagaatcagtgtgccgaagcacacgccgatcgcatacgcggaaatgtaatggcctgcggtggggatgtccacgccggtggcggccgcggcctgcggcagaatgcccatcatcacgaactcggcggcaccgagaatgaacgcgcccgaagccagtgcaagcagactcttcttcatggttcctctaattacttcagtattacttacaaaaacagtgcggcaatcgattgattcgagcgatatattacggtggtctgccaacaaatacgggggcttgccgtgatgtggtttgtcgctgtgtgcggcgggttgtttaccgctgttcgatcgcttggtttgattgttgggacaggaaacgaaaaaccggattgctgattcctcaacaatccggtccagttgtcgggctggcgggatttgaacccgcggcctcttcgtcccgaacgaagcgcgctaccaagctgcgctacagcccgtttggcaacagacgtagatattacattgtggtggtggacaatgcaaatcggcatgtcgcgagtgttgcgtgatggtggattcgccatgtgtacaggtctctcaagccttgtgcagagccggttttgcgtcatgtgagcgggtgttcggatggccgtgcggtctgccgggctcataatcgccggccttgcgtacactgatgaatcatggctgaagttgtcgaaaataccgaaaacactgagaatgaaaccccggccgtcccgcagatgagcaccgtcgaacgtgcggaaatgctgctcaagcaggacgccaccatccgcgagaagatcaagtccggtgccacgctggacgaagccgtggacccctccaacaaggagttcggcccgctggctcaccccgagcaggtgcagatgcgcgtggccaagcgcgcgatgatgcttgaggccggcattgccccctacccggtgcacttggacgtcaccgacaccatcgaggcggtccgcgccaagtatgacggcaagctcgaggctggcgaagagaccgaagacatggtcggcattgctggccgcgtgctgttcctgcgcaacgcgggcggcctgtgcttcgtgcagctgtccgccggtgacggcaccaagattcagggcatgatctccaagaaggagattggcgccgactcgctcaagcagttcaagcagctcgtcgaccttggcgatcacctgtacctcaagggccgcgtcatcgcctccaagaccggcgagctgtccgtattcgccactgagtgggctatcgcctctaaggccctgcagccgctgccggccctgcacaaggacctgaacgaagacacccgcacccgcaagccgtacatcggcatgatcgcggacgagaacatccgcaacatggtgcgtaaccgctccaaggccgtggcctccctgcgccgcacctttgacgaccacgacttcctcgaagtcgaaaccccgatgctgcagaccctgcacggtggcgcggccgcccgcccgttcaccacgcacatgaacgccttcgaccttgacctgtaccttcgcatcgccccggaactgttcctcaagcgctgcctggtcggcggcatcgatcgcgtgttcgaaatcaaccgtgacttccgcaatgagggcgtcgacgccacgcacgcccccgaattcaccatggtcgaggcctaccaggcctatggcacctatgattccatcggccagctggtcaaggagctcgtgcagaagaccgccatggacgtctacggctcgcacaaggtcaccctgctcgacggcaccgaatacgacttcggcggcgaatggaagaccatcagcatgtacgactccctgtccgaatcgttgggcgaggagattgtgccgaacggcggcccggacgcccccggcacctccgttgagcatttgggcgccatcgccgacaagctcggcgtggagcgcgacgacgtggagaaccacggcaagctcgtcgaacacctgtgggagcacttctacgaggacaagctttacgagcccaccttcgtgcgtgacttcccggtcgaaacctccccgctagtcaagggccaccgcaccaagcccggcgtggtggagaagtgggatctctacgtgcgcggcttcgagctggctaccggctactccgagctcaacgacccgatcgtgcagcgtgagcgtttcgtggcccaggccaaggacgcactcgccggcgacgaagaggcctgcgacatcgatgaggacttcctcgaggctctcggcgtgggcatgcctccggccggcggtatgggtatgggcattgatcgactgcttatcgccttgaccggtgccacgattcgcgagaccatcaccttcccgctggtcaagccgctcgttggctgattaggcatactctggctcccctcagagaggggagccgagttatatatgaaaggggttgcttatgtccatcggcttgtgggttcggggcgcgcgtcccaagaccttggccacttccatcgcgtcggtgatggttggggcgacgatggcatacgcgcatatcgagcagtcgggcacctgcatcgcaatatatcccgaaccggcctcctgcgccacggcccgtgaacagcagaccctgctgatggaccgattctggccggtgaccatcctgtgcctgctagtcgcgctgttcctgcaaatcgccgtcaactatgcgaacgactattccgatggcatccgcggcactgacgccgggcgtgacacggacgaatcgaaatcaggcaaaccccagcgactgaccgcatccggactggtaccggccaagcatgtactgttcgcggcgatgatttgcgccgccatcgcctgcatatgcggtgttgtggcggtcgtgctcgcccaagcatggtggttgctggccgtgggtgtggcctccttgctggccggctggttctacaccggtggcaagcatccgtatggatacgtcgggctgggagaagtcggcgtgttcctgttcttcggcttggctgcggtattgggcaccgaatacgcgctgtgcggcacggtggacgtcggcggactattgggtgctgtggcggctggcctgttctcctgcctgatcatgatggtgaacaatatccgtgacatcgacgaggatcgtgagcatggcaaacacacgttggccgtacggctgggggagtccggcgcgcgtacgctgctgattgtgtgctgcgtcatcgcatggatcatcgccctgctgatgtgcggcacattatggtggccgtggggtgcggtgctgttgctctcgggcactggaatacctgtgcgcatggtctccagcgtgaataaacgtcaattccgcccggctctgcccgccgccagcttccagaccttgctgtttgcggtggtgctggcggtttccgtggcgctctgagagcgaaataataagacgaatactcgtgtttgggcgcacgcggctgtagactgaaccgtatgacttataaactagtactgctccgtcatggacagagcgcatggaataaaactaaccagttcaccggctgggtcgacgtaccgctgaccgagcagggtgaagccgaagccaagcgtggcggcgagctgctcaaggagaagaacgtccttccggacatcgtgttcacctccctgctgcgtcgcgccatcaacaccgccaacatcgctctggatgccgcggatcgtctgtggattccggttcagcgtgactggcgtctcaacgagcgtcactacggcgctctgcagggcaagaacaagaccgagatccgcgaagagtacggcgacgagaagttcatgctgtggcgccgttcttacgccaccccgccgcccgagatcgacccgaacgaccagtacgcccagaacaacgacccgcgctacgccggcgatccggttccggaagccgagtgcctggccaacgttgttgagcgtgtgaagccgtacttcgagtccgctatcgagccggagctcaaggccggcaagaccgtgctgattgctgcccacggcaactccctccgcgccatcgtcaagatgctggacaacctgtctgaggaagagatcgccaaggtcaacatcccgaccgccatcccgctgctctacgagctggacgagaacttcaagccgatcaagccgcgtggcgagtacctggacccggaggctgctgctgccggtgccgccgctgtcgccgctcagggccagaagtgagcctaagccgctaacacggtacaagctgtaaggggagtcgcacataacgtgcggctcccctttgctatgcctgccaaatcccccatggggcggtgattaccccatggggcggtaaaaccctcatggggcggtatgccagaatggcttaattccgcggtttcacatatccttcaaaccgccccatgggcaagttaccgccctatgggtgttttgccgccccatggatacgccggtgtaccgcccaaaagcaacaaaaaaacggcgtccagccgtagccggatcgccgctttcgggcatcctcctcaaaccacaggagaacaagtgttcagttatttgcccaatgtgagaacaagtcccaatcagtcgatgtcggtgccctcgtcgcgggtcggctccttagtggggtcgaagccggagacgatgtacaccacacggcgggcggcggacacggcgtgatcgccgagacgctccaggaagcggcccagcagcacgatatccacggtctgctgacgggtgatgtcatcggacagcgctagatcgaaggtctggtggtgcagattgtccagcttgtcgtcagccaggatgatggcctcggcggtcttggcatcgcgatcgaagagcatggccaccagctggtcagcggtgttgtccaggaagtcgatcatctcggcgaacaccggctgagcggattcaggaatcgcggcggccggataggtgcggcgagcggcctcggccacgtggcgggcaagatcgcccatacgctcgaacgtggaagccagacgcatggtggaaacgaccacacgcagatcggtggccaccggattctgcttggcgagcaacttgacgcactggtcaatcacagaggactccagggcatcgatttcgatgtcgccgtcaatcacagtctgtgcggcttcaacgtcctgattcagcagggcttccccagctcctttgatcgccttgcgtacgttctgcgccatacggtcgaggtcgtcagcaacctgcttcagctcctcgttgaaaataacgcgcatttctctagcctttcatgcttgcttattgcaacctgtaccagtgtattattccagtacttgttccccacttcaacgtaggtaatggcaacctcaagttgttctactgttcattgggttgttcacctgaaattcatgttaccggcgtgccggcaaaccgcaatcccggcgtgtggtgtgaaagaatgggggcatgacacagatgccgctcgtcgccgcgattgctcttattgtcacggctgttttatttgtggtaggaatcatcacgctcatcgtgggattcgcgacacatcgagtgtccatggaatcgccgctggccgatgatgacgacaatgacgatctgtccgacgacaccgccacgctgctgtccatgctgccaggtgcgtccgtggtggtcgacgagcacgacgaggtggtccgctgcaatcccgccgcctaccgcctgggtgtggtgtcagatgacgccattgcccagcagcatgtgctggatgccattcacgaggcgcgcaagtccggtggcaagcgccagttcgacttgaccaccgatactccggagcggtacgtcgcagaccagaacaagggcgatcacgtcgccacgcagtccgtccaccgccccaactggctgaaggtgactgtagggcgtatcaacgagcagttcgtcatcgtgttgattaccgatgtcagtgatgtgattcgtttcgctcaagtgcgtgactcgtttattaccaatgtgtccgagcaattgttgggccccactgaggctctggccaaactcgccgattcgctggagtccggcaatctggacgaacagcaggtggctgccgacgctcgccaggtgcgttccagctgcagcaagctcaaccacatggtgtctgatttgctgctgctcatacgcgcgcaggagccgattacgccgtcttccgccaaccgactgaacgttatggaacagctcagggccacggcggcgcgactggagccgcaggcagccgaggctggcgtgcagctgaacatcaagggcgacgatgatctagtcatcaatggtgaggcggaccagatcgacagcgccgtgaccaagctcatcgaaaacgccatcggctattccaaggaaaatggcgtggtcagcgtgtccgcatccaaagacaaggatggcgaccgcgcggtgattcgcgtgattgaccaaggcacgggcatcgctaagaaggaccaggcgcgcatcttcgagcggttctaccggggcgtggaacagagcaatcgcacggcggatggcgtgggcctaggcttggccatcgtcaagcatgtggcgctgacccatcatggcgatgtgaccgtatggagcgcgcccgggcaaggcagtacgttcagccttacgttgccgttggcgcagtgaggtaaggaattggtggcatgccttgcatgccaccaatgctgtttgatgagcgacctgcggccgcggtctctccctcaatcagctacgctgacagctcccgtcatcagagggagcttgtgttgcgttactgtccgaggcggcggtagtcccagcggtcgaagtattcccagaccagcagtagcaagccaataatgacgccggccacgcacataatcaccaacggcattacgctgtagcccacggccagcagaatcagcacgacaatcaacgccacaatccatagaccggtaccgatggcaaacaccttacgcagatccacccgtacgggcttgggtgcgggtttgcggacggcagggtcaatgagaggcgcgaacttcatactcatgcactgtagtaagagtagggaggggcgtcaaacatccctccctacgatttattcaatcggcatcagttgagaccgatcaatgtgcatggcatatatggtcggcaatgcggggcatatatgccatcacaggtgctcgaccacgtagtcgacgcacttggtgaaggccatgacatcagccggttccaccgaggggaacacgccaacgcgcagctggttgcggcccagcttgcggtagccggcggcgtccacaatgccgttctcgcgcaggatggacagtacctgagaggcctggactcgctcgtccagatcaatggtgaccacggcgttcgagcgtgcgtccgcatcgacgacgaacggagcggcgtattcggagcgctcggcccacgagtacaggatggatgcggacttggcgcaacgtgtggtggcccaggcgaggccgccgttgttgttgagccagcgaatctggttttccatcatgatcagggtggccacggcgggcgtattcagggtctgatccttgcgggagttgttcagtgccgtggtcagcgagaggaacggcggcacccagcgatgtgcgccttccagatgagcgcttgattcgacgcctgccgcacgatcgatagcttcgggggagaggatggcgacccacagaccgccatcggcaccgaaggccttctgcggtgagaagtagtagacgtcggtctggctgatgtccacaggcaaagcgccggctgcgctggtgccgtcgatgacggtcaaggcaccggcttcacgacttccggccacgcggcgaatcggggcggccacaccagtggaggtctcgttgtgagcccagcaatatgtgtccacgccctcggtgagctcaggcagacggtaagtgcccggctcgccggggaacagcaccgggtcttcaaggaagggtgcgttcgcggcggacgcggcgaacttggcactgaacgagccatacgtgccgaatgcggcgcgacgggtgatcagcgaagcgcaggcaatctcccagaacgcgctggcgccaccgttgccaagcgccacctcatacccttcaggcaggtggaagaactcgcgcagaccttcacgaatcgaagcgaccagttgcttgactggtgcctggcgatgtgatgtgccaagcagggtggtggcgccggcgtcgagcgcggcgatctgttcggggcggattttgctggggccggagccgaagcggccatcttcgggcttcagcgactcgggaatactcagtgtgatagtcatggtttcaagggtagaccagtgttggggaatatcgcggataatgctcggtgtgcgggattactgcggggttactgcggaattccggggtgccgggcggcagtggtggcaatgcggaatgcagtgcagaatgtacgcagcacatcatggttacggtgtgtcggaatgacatgagttagtgattcttccgataaccggatagtgaggttcgtgaacgggcggaaacaaggcagttttttcacccggccgcacggttacgtaaatcgtttgacacacccggatggtgggggatcacattgaggattgacctctgttcgttgtacagtactcaattgtgacggtcatacgaggtcatcgaaatgaccccgccgaacccatccaaggagttaacgtagtatgaagcatgcttcgcataaagcgaccacggtctcgcgccagaagttcagcttagcgaaggcattgtttgcctccggcaagggttctcattccgttcgtgctgtgcgtgcggtgcaatccgctggtagcgacgccgttgttttggggcttgatccggccattgccgagaagatcaacgaaatcgctccccagacccgccgttccattcgtgaggccgctcgtgccgctgaacgccgtagccatattcttgcctcggcctcactggccgctctggtcggcacggccgcaggtgctctcgcgttttccaacaatgaagacgccacgaactcgttcgtggctgatccggccacgacgaccacgcagattaagcgcatcagcgatgtgactgcggcttctcgttccgaagcgcgtactgatttgagttcatcctccgttaccgcacagtccaccaatgaaggcggctgggggctgagcaattcagacagcaccttggacgccaagctgatgaatcgcaataatgcgaacaatcctgtggtgtcggctctcatggatgccgatggcgatgctgtgccggctggcttcaacccgaaccatgccgttggcaccaactccaacaactatccgtggggtcagtgcacgtggtacgcgtaccagcgtcgtgccgaactgggactgccttccagcggcaacttcggcaatggtggcgagtgggcggcgtcagcttccgctctgggctattgggtggacaacactcctcgccatgtcggtgatgctgtggtgttcgctcctggccaggccaatgccgatggcacatacggccatgttgccgttctggaaaagatcaatgccgacggctccattgagatctccgaatccaatgccaagggattgggtgtgatttcgacccgtacgttcagcgccgccgaagccggtaagttccagtacgtccactactgattcatttcattggcttacattcggtgattactgttcggatgtgacgtcgccctatcggcaatcgttcgcgcgaaatgacatttcaagtgttgcgaccgcgtattagtccgaactgacctgtgccgacacgccgatatatcccaatagctccggggtgttttatttcttccatcctgtacgagttaatgcgcaccgtgtaaggtgacggttctatgaagaccaaaactgtagcttcttccattgttgccgcgattgtctcctgtgcttgctcgtttatgtttgttcctacagcgactgcagctgagggtgttactgtgacttccaccaagtccttcccctcgtacacccaggtgcgcaaagatctgacgactgaagccactgccacgaatgttgaggacaatgctgattggggcggcattgagaacctcgacgtgccgcagacggaatctcaggcggaaaaggatgccgcagcggccaagaaggctgccgaagaggaggccaagaagcagacggaggccgaggctcaggcgacccagaagcaggccaacgccgcgagccgtaatgagtctcgctcttctgttacttattccgatgccagtggctcggtttccgctggtgccggtgcctctatcgaccgtgcgtattctttgatcggacagagcatggactgcaccgcattggtcagtcaagcgttggcggcccgtggtattaacttccacggttggcctgaagagtacgtcaatgttcccggtggccacgtagttacagacgggtccctgcagccgggcgatattctgatttatgccaacaccggtggatggaatggcggcgcgcactacgatcatgtggcgctgtatgtcggcaacggtcaggcggtccatggtggctggaacggctacagcgtggctctcgctagcgccatgaccgaaaaactcaccatcgtggtacgtatcccgtgatgcagtcttattgattgatatattgcaggcctcggatgccaatcggtatccgaggcccgttgcgttctcctgccgagtgatacacccgcgacatcatcttcgaaaagacattcctgttatgaaatcgacccatgtgtgctaaggtaaggcgctgatgacgaacgttaagaatattatttccacatcagtggcggttatcgccacgggtgccatgtttgcatgcgtagccccgtttgcctctgccgattccgcgcagacgagtgctgtggtgtcctcacgctctttcccgaaggcgagttcggtgaagaagaatttgttcgccgaatccacctccacttcggttgacgagaactctaaatggggtggcatcgagactcttgatgtgccacagaccgagtctcaggccgaaaaggaggctgctgctgctgcggcggctcagaaagccgctgatgaagctgcggcagcccagtccgctgctgctgcagccagccgctctgaacagcgtgcgtcgattccacaggttgacttgggtaaaatgactggcactggcgctgagcttgccagcttctcactgaagttccaaggctatccgtatgttgccggtggcaacactccggcaggatgggattgctccggttttgtacagtacgtcttctcccagtttggcatttccctgccgcgaacctctggtgctcaagccaccgtgggtactccggtcgcaagcttggcggatgccaagccgggtgacattcttgcgaatggtactcatgcggccatttacatcggtaacggacaggtgatgaatgctatgaacccggtgcagggaacggcagtaagcgacgtttccgtattcggtggagctggatattccattcgccgcgtgatgtgacaagaattatgcggtaagcgaattcgtattaaggcacgtcctttggggtgtgcctttttcgtatacgcggatttctttttgagcggaggataccggccaaaccgagtgtcgcggggtattgttgagatacgcggtattcgtgccgcaataacttcaaggaggtcgtcatgattaacgacaaggctattctcgtcggcgttgacgggtcgcatgccagttacaaggcaacatggtgggccgcgaattatgcaaagcacgcggggctgacgctgcagattgtctgcgcatattccctgccgagctatgccgccgtttcgttcgatgccacttacacggcgatgggggacgataacgccgcgcattccgatgctcaggagattctgtccaaggccaaggccatcgcagacgagcagggcgtcgaagccgccacactgattgttaccggagatccggcatcggtgttcgtcgaattgtctcgtaactacaatctgatcgtcattggcaaccgtggcaagggcggtctggccgagcgcctgctgggcactacgtcctcatcgctgccggcatatgcttactgcccgattgtggtggtgccgtacaccgatgatgacggtaacctgatgcacctgaacaacacgatcaccaaggtggccgtcggctccgacgaatccaagtggggtctgaaggcgctggacattgccgccgacttcgccacgtgctggggtgcggaactggacgtgatttccgctgtgccgaacctgaagggtgtggacggcgaggacgccgtcatggagtcctacaaggacgatcttgaggtgcgcatcaagccgttgcaggaatcgcatcctgatctgaagatcaacaagcagatcgtttccggcccggccgtgagcgccctgaccaaggccagctacgatcacgatgtggttgttgtcggctcccgtggtcgcggcggcttcactggcttgctgctgggctccaccagccagggcctgctgcagcatgcggtcggcccggtgtacgtggtgccacgcaagtatgttgaggccgcggaatcgcgtctcgacaccgtgccgagctcgcccgccgaagtgcctaccaagtcgctggaggagattgccggcgtcgaggagattccggtgtccgcagccgagcctgaagtcgcccagcagatcgaaaagaccatcgatcccgatcgccagtaaagtccgaatatacggaaagaggctcccgccagggagcctcttcaatttatatcccgtctcagtgcttgacggtgacgttcatgcgcaccggggtctcctgcacgtaggtgtgcttgaccgtgcaacccttgtcgatatggcgggtgacgcgctccttgagcttgtcggcatcctcctcggacagaccggcgtcggaagcatcaatcaccacctgctcctcgaaaccggtgtaggcgtcattttccgggtcgtacgtgccatccaccacaatcttggcacccttgccctcacccagcgtatgttcgatggcgaactggctggacagcgcggcgcaaccggccagcgcgaccttcatcagatcgcccggcgtgaactggccacgatccttgccgaacttaatgtgtgcgccatcgtcgctgaacgcatcccacgaaccgtccttgttacgctcaacccacagtcgcttacccatagctgctcctttattttcagccgccggcgatctggcccatcgccatgccagcgggggagcgcggcacctggccgctctcccgcatcagtggacttctctattatgcccctaagctacactggtgcacatggctttgaccgaagaacaactcgcagatattcgctcccgtatccccgcacgtcccgaaacggacattccgatgccctatgaggacctggtgcgcaagatcctgaccgaaggcacgctgaagtccgatcgcaccggcaccggcacgatttccctgttcggccagcagatgcgctttgacctgtcgaagtacttcccgttgctgaccaccaagaccgtgttcttcaaaggcctggcctatgagctgctgtggtttttgaagggttcctccaacatcaactggctgctggagcacaacgtgcatatttgggatgagtgggcggacgagaacggcgatctgggcccggtctatggcgtgcagtggcgttcctggcccgcgccgacccccgaggacccgaatcgcaccatcgaccagatctccaatgtgctcgacctcatcaagcatcatccggattcgcgccgcatgatcgtctccgcgtggaatccggccgaggtggagaagatggcgttgccgccctgccacgcgctcttccagttctacgtggccgacggcaagctaagctgccagctgtaccagcgttcctgcgacatgttcctcggcgtgccgttcaacatcgcttcctactcgctgctcaccatgatgatggcgcagcagaccgggctcaagccgggcgaattcgtctggaccggcggcgactgccacgtctacgacaaccacgtcgaccagttccttgagcagctgggccgcaagccctacccgtacccgaccatcgagattcgtaaggccgattccctgttcgactaccagtatgaggacttcaaggtcgtcggctaccagcatcaccccactattaaggcacctgttgcggtctgatgctgattaccatttcgtggacagcgaagactgtggaggcgacgggccccgagtcctcgctgtccactacactaaggcccagttccgcaatccaggaggagtaagcgaaatggagcatgacagtagccgtagcggctatcacgaacccgagcccggatctgccgggctgtctgccactgaagaagactggggtgacgattatcccaagaccttctcggtgaatcttatctgggccgaagcccgcgacaaggaaggtcgcgccggcgccatcggcctcaatggcggcatgccttggcactgtgccgaggatatgaagcatttcaaggagctgaccgtctcccacccggtgattatgggtcgtaagacttgggaatcgcttggggtcaagtaccggccgctgcccaaccgcgacaacatcgtcgtttcccacgatccgatgtaccgtgcgccgggagccactgtggtcaccagtcttgacgacgcgctcgatatggcccgtcaggaggcgattccggacgacggtctggatcgttcggagatttggatcaccggcggtgcccagctgtacgccgaggctttgccgttcgcggacaaagcctatgtgactgatctggccgccaccgtggatgccgacagctacgcgcccgatatggcgtcgctggtcgaggccgggatgtggcgggaagccgaagtgggcgagtggcatacgcccgccaaggaggagtccggcatcgattcctatcgtttccgtatcttggctaaaaccaagtgagcatgcgaatccggcttgtgtcctttatggcggcatgagccggattcatattcattcgaccccaacaatacagtcgggccgtgtgcggcccgttgaagcccgattgaggatttattcaaagctatgagcaatacccagccctacaccgtaatgaccgtctgcaccggcaatatctgccgttcgcctatgggcgagatcattctgcgtcacttctttaatgagcgcggtctcggcgaccaggtgaacgtggaatccagcggtgtgtccgacgaggagtggagccatccgatcgacccgcgtgccgtgcgcgtgttacgcgaacgtggctatggtgatgagattctgcgtgaccacttcgcacaccgcatctcacgtgaggaaatcgaccgtaccgacctgttcctgccgatgaccgcctcccacatgcgcgccctgctgcgcatgctgccggccggcaagcgcgccgaagtgcacatgtaccgcagcttcgacccgaatctgcccaagccgaagcccggccgcgaagatcagatcgatctggtggacccgtggtacggcggcaagcacgagttcgaggtcgccatcgaccagattgaggaagtcgccccgtacatcgtcgattgggtggcgaagcagctgtaggaatcggcctgtggccgatgctgtgtgtttcgcagtcttacgactgcgggtctctacctccgtcaccgcttcgcggtgccgcctccctcgtcagaggaaggtacagaagattacctccctctgtaagggaggtgctgagcatagcgaagcggagggagagactaacgagtcgggtgcctcagaacaccagttgcaccagcaacatatatacaattgtgccgccggcgattgaaagcagcatattgcgtttccatacgtgcagcagcacgatgacggtgcaggcgatgagttccggaaggccgtgtgaaccggtcagaatcggggtgttgcgcagtgcgtataccaccagtagaccggtcatcgcatagggcaggacctggccgaaatactcgatgatgcgcggcggctgcttggactcgggaaacaccagaaacggcagaaaacgggtgcacatcgtgcccagcaccaccgtcacgatagtgattgcgccttgccagatggtcatcgtcatcgcgtctgtccttccttctgctggtccgctgcgtggctcatggcatggtttgccgtggcttccggggcgtcggcggctggccgcaacacgtccagatgcgggcgcaacgcgacgaacagtatcagcatggcgatcatcgagggaatcatgaaatcattggccccgaatatcagcaggcaggccagtgatgtcagcacaccgatgacggcggacagtcgctcgcgatgcttgccgtcgagccactgatcgaggaaaatcaccagaaacagcgcggtcagtacgaaatcaagaccgtcggtattgaacggcagatgcgcgccgatcagcccgcccagtgtggcgccggtcacccaatacagctgattgcacagcgtaacccagaagtagaaccagccacggtcgatgccggcggggattttcgcggtggagttgatggcaaaagtctcgtcgcacataccgaaaatcaggtatgggcgcttccagccgagccctttgaatttgccgagcatggatagtccataaaacaggtgacgggcgttgaccatcagggccagcagaaagccggcgagtgggttgaacgcggagagcagcagattcaccgtgacgaattccattgaaccggcgaagatgaacgcgctcatacacatcggccatacgaaggagaagcctttggtgcccatgagaatgccatacgaggcgccgagaaacaggaaccccaggcaaatcggtatggtcagcggaaacgccgctttgagcgccggcagccaggcgttggtgttggtgttggcggtgtctgccatgtggatgatgttctccttgtacaactggtctgccggccgatgttcgccgatgatgccatatgcggttatacacgcatggtgtcgataaacggggtgagggtggcgtcgggaccctgtgcgcgaagtcacagtgtggaggatgtcacatcgtctacggtgggatagtccttgtggcgggcgcgaacacgtgctgagatgaaaccatgagcacatatcaagcgggccgaatgctttcagacctggtcccgcgaatacgaaaagacctcggtcgctatgaccggggtctttagtgaagtacccccagagagagggatacggtcccatggaacatgggccgaaatccatcgctccgaaagcatgcctgtacctctttaccaattgcgaagtcaataataccaacggtttccggttcttgccggtagatatgcgagcagtgttgctccttgttgtcatcttcatgcgactggcggccgaaacggcctgtaatgagtgattgaatcagcctaaaaaccaatgattgcaaggcctcaggtggcataggtgcatttttaggtgcagcggcccgtagagagcctattcaggctacttggtggcatttttgatggcattttttgaagcggctacattgtgccatcgatttcggatttagcaaggagttttaccatgcctgtaaggacgaagaaaggtagtacagggccgtcgttggagcgccggagcaagttcggcaccgtgacgccgcgttatgatgcgtcgggcgatcttgtcgcttggcaggtgcgatacccggacccgaagcgtccgggcaaaaaggtccagcgtcagttcaaaccggatatggagcacgaagcgcaccagtggctcgaagaggagcgacacctggtcgaactggaccgcaagaacatccaggaatgggttcacccgtccgaacgccgtcgcaggaagcgcacgagccttatctcgttcgaggattacgtgacccagtgggcggaggaataccgtttgccgaacggtgagaggatagccggaggtacgctccgcaatctgaatctcgatattgcgcatttcatgccgggcttcaagggcaaaattctggccgagatcacaccgaaggacatcaaacgctggtatgacgcgccgcaccctgagggacaatgggcattccgccgatcatgcatgcgactgaaagcggcgttcaccagcgccacaaagatgagtatggacggctctccgccgttgatccgagacaacccgttcatcctgcccataccgccagcaccgcgttccgccagagaggacgttccgcctgttacacctctcgaactcagtctgatagcggagaatatgcccgactacacaagactgacagtagtactcgccacgctcgtcggaggcctccgttgcggcgagctgtgcggcttgcaggtcaaggacatcgatctgaaagccaaacgcctgaccgtgcgccactccgtcaacagaggatattcggatcgcggctcgacgcgcatagctaagaccaagaccgactccagccgacgcactgttcccatccctgacggacttattcccctgatccatgatcatttgctcaagcattgcgaatggacggactctgaagctatggtgtttcggcctaaacgtgctgtggtgatgagccagaccaccctggaaggccagttccgcaaagctagggagaaggccggacgtaccgatctgaccttccaatcactgagagcgagccacgcgacgctgctcatgctcaagggaggcactctgagggaagttatggacgaacttggccacgttagcgagaaagtcgctatcaagcactaccagcgtatcgtcgcccagcatcgcagccaggtcatcaatcaacttgccgaagactttatcaaagcagctgtcgtatatgaagagcatgaatgaagcaatagtgattctgtttagaatactattagtaagcaaaatacactaaaaatatatgactggcgacgatgcaatatgtattttgttcatgtcgtaattacattactaaattcgaaatatctaagacttctctgtttctcattgtggatggccttattttagaaggccatccaacaaatcttagtcatattggattcgatttaatgtcagtatttcactgacggtcttttataatgttcttttatttattctccttcgtaatctcattatttcgtaatttacgtatgcttacaatactatataaaataagtgcaactaatgctgcagatcgagtccagttggtattgcagataatcagcgcgagaaggataaggccacaatatattgtggacctaatccaacgatagggatacttatcgttgatttgaattgactgtattatcgcccaaataaacgcgccgaccataattgcaccattcaaccataggaggagtgatcttcctgtagggtcgggggtgtctgagactgcaaaattaccgaaccagcatatacacgcacctgtaaacaatgcctcgggtgctatcagcatattttgcgagaacatttcacaatgctccttctattgaacactgactccgggtggaatggctatcgtgagacagattccctttccggtggctatagcgcgggtgatttgcagagcgagattcgcaaggtatagagtccctaccgcagaaacaagtatgccggcaattgttccagcaggtcctccgaccgtggtccccaacgcagtcaaggccgctgccagcgcctcggggcctatgccggccgcgacggttacggcggtagcaatgcctacagtaagatccgagtgggaaatataccatccatcgcatttcgccatcgctccggatggagaggcaggaacccttgcaaacgaagtgttatcagcatgagtagctcctaggacggtatcttgcaagaatgtatattgagattccgaaaaaccgtatgtattcttaagctcgctctcattcaaggtaataatcaactgattgtccacatatttaaaatgtgtgccaacagatacgattttatttaaagtgtcttgctgctcgtcagtcaattcaataggattagtttgacatgttgtcacgtcaatagggggtgaattgttctcgacagctgttgcggttcctgtgaaagctgacatgcacaaaaagattgcaataatgctgctcagtatgcacctaaagtatttcatgataatctcctttgattattgtttggggaatcttatcccaatttaattaaagcattgatgtatattcgaagactctatcattggtggttttgtcatctaaagatgacaaaaccaccacggctcctgacatctctaacgctgccaatctttgttcgtatgccctctctgtatgcgaacagtgctacatacccaatgtctaacataccagcagaaggcatgagacgactcatactcatgcttaagggcgacactctgagggaggtcatgaacgaacttggccgcgtcagtgaggaggtctccatcaggcactatcagcgcatcgttgcccggcaccgcaactaggccgtcaaccaactcgccgaagacttcatcaaagcggcacagtgaataaggcataacagaataagcacattactgaaggcttccgcacactcaactcaataggtcaattatcaaaaaatggcattcaatgaaaatacactcaagatatgaatatattgtcatctctagatgacaaatgcgaacatagttctttaagcgtatccacttacagcgtctttcagtttcaatctccccacacaaggtgcacacagggtgcgccttgcgccatcgagggagattatcatgccgagaatcagtcattctcatgaaagttatcagtcaaagcctccacggagtaaatggggaaccgtgctggcttgctacgacagaaccggtgcactaatagcatggcaggttcgggcctataggaacttttgtggtgcttataaccgtggcccggccttgtgggagcaggcgtgtcggcctgtcatttttgtcgcgtggaaaatgttgcgcccccggtggtgggctggatggcgtgagaacgccatccagcaaagcgaagagatgccccgtgtgcgggcgtgcgatgaagaagaacgggcggaccggcaagggcgtccagcggtggaaatgcccggcctgccggttgagctcgacgatgccgcagcggcggcgcaggcgggagcggacgctggaggagttcctttcctggctgctggggccgtcatcccaaagggcggcggactccgcgggcgacgcccgcgccctgcgcaaacgaatcgcatggtgctggcgcatccgcccgcgcatcgccccgccggacgccaggcgccacacggtcatggcggacggcacgtacatgggccacggctggtgcctgatcatcgccatcgacgggcaaaccggcgaggtgctggactggcagtggtgcgcgcacgagtccaaggccgcatacctgaccctgttctcccggcttcccgcgccggacgtgctcatcgccgacgggctgcgcggcgcggaggcggcgtgcacgcaggcgtggccgggaacgaggatccagcgctgcctggtgcacgtgcagcgcaacacgaggacggacctgacgtccaggcccaggctccaggccggccgcgagctgaagaggctgtccgacgggctcacctcggtcgagacggccgggcaggccgtcaggtggggcgaggccctcaacgcatggcacgaacggtggaaggacttcatcgccgaacgcacctacgcgcgcgacgacccgtccaaccccaaggcgtcgaggcgccggtggtggtggacgcacgaggagctgcgacgctgctaccggcggctggagaggctgttccgcgagggcaggctgttcgcctatctcgagccggaactgctgaagggcggtccggtggcgcgcaccacgaaccggctggagggcggcgtcaactcggtcgtcaaggacgtattgcgcaaccatcgcgggctgcccgaggagcacatgcgccgcgcgtgcgaatgggtatgctacatgaagaccgcgcacccacgaccggagtcattcatccccgacgccctgcggaagggcgaaaaggcaacgacgcccgaaccggacgacagcgtcgcgcccgcatacgggaccggcatcgactggaacgaattccacaccaccacgcgataccccaacaccaccgactgacaacgaaaaccagtctaaagcaccacaaaagttcctataggcctcaaggacgtattgcgcaaccatcgcgggctgcccgaggagcacatgcgccgcgcgtgcgaatgggtatgctacatgaagaccgcgcacccacgaccggagtcattcatccccgacgccctgcggaagggcgaaaaggcaacgacgcccgaaccggacgacagcgtcgcgcccgcatacgggaccggcatcgactggaacgaattccacaccaccacgcgataccccaacaccaccgactgacaacgaaaaccagtctaaagcaccacaaaagttcctataggcctgaaatctctggccatccagagcttcctgtggctcgcaatcgatagcgcaggagccggcccccatgatgcacagggaatccggctcctacttccatttcctcctcagaggctggcttatctcatactatatcgttcaccaacgaccagtgatatctgattcgtttcgggaagagtcagcttgtgcgaagatccacggtccgaaaatccaaggatgcgaccatcgggctgaaatccatcgtaccgttgcgtgtatccccgagtgcgccaaggacctgatccgggatccatagacgagcgtcctcattgccgggcttgaaatctacacgcaacgtctcgatgatgtgtcggctgcgaatccccctggcaaagtcgagatccctgtcgtcctgatgggattcgcgcgcctccaagacaagacggttcaccccatactcgtattccaagacgggcagcagcagttccagacattttctcctggcccgctccgaactcaccgacccgtcgagtggtatggccgccaccacgatgtgcgacaatgcgagtcgttcgataatcggtatggatttgcgtttctccgaaggtgtcatgtcgcgccagtgaagtttgggcacgtgtcttttggtgaccgtggtcagcatccgatgtacatcaacttcctccagattgcagatgcagacacccatgtagtatgcgggaacgtcttgtccctgcgttctgacgctttcatcgccccaagcgactagattactcattggctttcacctccgtcatgtctcttcttctgcgggacgagttcagcgattcccgatcgaacggcggtagcaccgtgtaggtgttcaccttggagaaccctgtggggctcaatggcgtggaaatactttctgatattctgctgaccaacccgcgttcgaccaactcatgcagccctctttcggctgtgtcagccgaccacccgtaccattcgggcatgcgctcagaaggtagccggcagtaggatttctctcccagtacaaccagtagcatggccaatgcgggaagactgatttcctcgtcgagaccggtgcgccagaactcatatgacaggcgcagaaaccgttgccgaggcctctgatagggtccgccagacccatcctgggacagaagacgcaccttgacctcgcggccggagcctgatcgttcccgcttgattagtttccgttgctgcaggcgggagagtatcttcgtggctgcagcttttcctgaatcgattccggcatgctgaaagcatccgaacgcccttgcccaggtctgcaatggcagtgtggtgtaccattccccgttctcatcgctgctgctggtcgatgccgctatcagcagatacgccttgagaccgcgcaaatctccgttcctgatgaaccgggcaagcacgctgttgcgctcttcgttgccacgtggaagctgcacgaaggatttgtcaatcggcacgaatgaccgtttcgagcgggcaaggagtgtctctacggtctcacgccagtcaatctgattatcattcatatgctacctttcgcatgaacatcatcaccattgcccgcaatgctaccatgcaagccgaagagagcgaatgtttcatcattgcagatgacgtacactacagcgggtatatgtatatatctctctaatatctattttgtcatatctatgccattgcctgacatgtcctatgccagcttccatggaaaacgcatccgacaccccgtgctgtcgcgtcgagcgatgtactacagcagaaatatccgacattttcaccggtctgcacatcaggatttgcgacgctatcccattcctcacctacgaacaagacgaaccagccccctacagcgaacatatccgctcctcatctctgctcaaaacgtaattcgtccgggaagatcggggaatccccctgattcgtatcccacgacggcttgtgctgtggcgggaatccgttcccggattggccgggttcgccggcatccgcatcgcccgcatgcggttgcgcgcccccatggtccggggcacccgtacttggtgaggggcgttgtccggcggcgtccgcctccgttttcctttgcatcgactcgttgacccgtcgcatggcgtcggtgagcctttcggcggcctgttccagtgtggaggggttattgttctcgtgcgccgtgtgtcgggcgtggtcgagttcggctccgagatcgatgcgtggccgggcgtcgtcggtcctgtccgcggaatccttgtagagcgtgtcggcctgttcgatgacctggttcagtttctcccgcgcgtcggcgagctgcttgcgttcgcgtgaggctttggccttgccgacggcgtcgcgcaggtccttggtgcgggcctggatttggccgttcgttttttccatggacgtccgccggtggtcgagctggttcgtcgtcatgtccggatcgcaggcggccggcggttccgggagccggtatcgcgtgatcgcggcgaccagttccagggtcttgggatcctgcacatccccgtcgccgagtctcaggtatggttcggcctgttccaataccttgccccagtccgttcgtatcgtgtccgactgcttgattgcttgattgcatgacgtgagcgccgcctgatggtcccggatgctcatcatcgcagccagacccgcggccgacccgatgatgacggccaatgtaagcgtgatgccgatgatgcggacaagggggatgcgtcggcgtacggggacctcgtccgattccccgggcgccatttcctccggtgtgatggcgtcgtcggctgtctggccaccggtttccctgggtttcggggctgttgccggttcctcccgcctatgcgtgacgggcgtgtgtgtcttggtcttctcgtttcgcgtggctcgtgccggcctgtcgtcgagaacgggtgcgatgggccggaaccggcgtccgggtctcgttccggctggtggttccggcggcgctccggccgttcccgggtcctcgatggcgtgcgcggcccattggtcgagttccggccatgtgccgggatggtcgtggatctgggtaagaaggtcccagttgccggggtcgctcatgaggtcggaaagttcgtaaggatcgagcctgggattgatgcggcgcatgtttccttcttttccgtcggggtcagtgtatgtaggtgatgttgggattgttggcctgttccttggtgagggtcctgagccatgcgtacgggatgcctccgccggattcgctgatgacgatgctgccgttgtctttgatttcctcgacgatggcgacgtgcccgtagtcggtgcttgcgccgagatagcctttggtgaagctggccacgtcgccgagctgtatgtcgccgccggtcgggtatccgagtttccgggcgcttgacgcccacatccagccgtcacccatgtagccgtccactggtttgccgatctgcagtcggcgggcggccgcccaccatgtgcattggccggtcgcataggtggtgatcctgcccacgggcgtgccggtcgccgccacgtccacattcaacgtgccgggctgcatggccaacggcggcgcgagcttgccgatggttcgtcctgccgtggccgaacagccgcctcccatgtcgatcgccggtctgacgttgtcgaggtaccgtttggtgatgcttgggatatccgggtatttcatgaggttgccttcgccggcgttgtgggcgatgaccagtgccgtcagatcgtcgagcttggcgaatggcatgtccgggtgcgcggccttgagctgtttgacgccttccagacggtttttcaggtacatgccgccgtaatgggcgtggaccatggggtcggtgatgccttcgggtggtgtctggtcggcgccgtcgggatgtacgccgcgccatacgctcctgttcatctgcagcaggccccatgtgccgccgttgctgtcgtcggcgtacgcatccggccggaaacccgattcctgttccatgagcgccgcgatgaaatccgcgcccaacccgctcgaccgggccgcctcgcttacccagggcttcgcctcgtcagggacctcgatcacgccggcctcgcagcctccgccgtctccggcggcgacggtggggatgaaccacagcaacaggctgacgatcatcagcacggccaccgcgcccagcaggatcgggacgccgaccgtggccgacgccgctgcggtgatgccggccttcaccgccatcgccgtccgtgcgaccatccgtatggcctgccgtgcggcctgggtcgaggccttggcggcggatctggccctccggccgcccgatcgcgcggccttgccggaacgacgcgcgcgcctggcatgggccgagaccctcctccccgccgcgacgcgcgccatggtgccgcccgtcgcgctcttcctgcgcgggacgccgttcaggccttcgccgatccggccggcgactgccgtcggctgcggattgttttcttcgctgtcctcctcctgtgccggttgcgattcgagcacggaccatgccatatcgatgccgcgttccgcagcatcgatgggcgtcgtgccgttcggatgcggggcttcggggccaccgttgcggttcatggcccgtgggcgtttcggtccggccggcccgtgggcagaggagatcccgttgatgtgccgaacccgcagtccgggaatccttccgttcggccgtatgagattgcgcgtggcccggaatgagctgggggcgaggggtctcatgcgggtttccgatcctcgaatttcgtggtgtacagccggtagagcaggctgtcggtgtcgatgcgcccgtcgaatggtatgaacgcggtgccgcttttggccatgccctggccgggctgcacgccggtgaagaacgcccgctgctcgtcggacagcttcagcagttcgcacagggcgtcagcatccgtggcggtctggttcagcagcaggaggaagtcgctgttcgcgagcatcagcctcgcgtcctggttggccagcagctcctcgatgttctgcgtgatgccggtggggctcaagccccatttgcgggcgcgcttgtacaggcgcaggaagtattcggccgcgtaccggttcgagaacagcaggtggaactcgtccacccacagccaggtgcgccggccgagacgtcggttcctgacgacccggttccatatctggtccaagacgacgagcatgccgaacgtgcgcagctccgcccccagtccggagacgtcatagacgaggaaccggctggacgtgtccacgtcggtggcatgggagaaggcgttcaggctgccggtcgcgtagatctccaacgcgcgcgccgcgtcacggccccccggctcgcccagagcggcgaggcggtcgtgcagggtggcgagcgtgggcatgcccagttcgggatgctccctcacctcgcggtacatgccgatgaccgtgcggtcgatcaggctgcgctgcatgcggtcgatgccgtcctgtccgccgatcagcacgccgagcatgttcagcacgctcgcgcatttcgaccgtatcgggtcgccttcggaatcgtcttcatattcgatgtccagcgcgttgatgtgcgcgcgcgacgattccccaatctcgactcgttcgccgccgagaccgtcgcacaacggcgtgaactcatgctccgggtcgatgacgatcagatcgtcgtccggccgggtcagatagatctgggtgatctcgttcttcgccgcctggctcttgcccgacccggtcgtgcccaggatgaacccgttgccgttcatgcctttcgtgcggtcgatgaccacgggattgccggtgcgcgcgttcgctccatggaacacgcctcccggctcgaacagctcctgcgacgtgaacggcaccagaatcgccgcgctcgacgtggtcagcgtgcggcgcatcggcggcaggggattgcccaatggcagcacggcgttcaacccctccacctgcatgtaggccaaggtctcggccacgcacgactgcccatcgatcgcggccgtcacgtcacggaccgtctggtccagttgctcacgactgtccgccgacacgtccacgatcatgagggaatccaccagacggtcgccgttatgctccagatcatcgcgcagctcgcccgcctggctcatggattcctgaagatcatgaggcagcatgtcttcgggcagatgctgtttgcggttcttgcgccgctcgtcgatggcctgcatgtccatctcggcgatcgtccggttcacgagcttcagcccctcggccttgccccgcggggacagatggatgccgactgtgatatccgccttgatgtccgtgatggacgacaccagctggtcgctcaggtaatccgggaaatcccgcaccagaagacactggtgccatacttccgtggtgcccgagctcaaccggagccgccggcggtccgacacgtccacggcgaacggggccacgtaatccttcgtggacatgccatgcgatttcaggaagccgtcctcgtcgaacatgaaccgcgtgccgcgacgcagcatcccgtgcagcacctccagccgggaccggcggtccaggcgcacgccgacgcagccgcccaccgaccgcagttgcgccgtggcacgcagcacggcgcggttcagcagcgtgaccgcacgttccccgtcccgctcgcgcagcgtcagcgtcagatacttgtccgtcaccgcgccctgcgaacggccggcgagacgccggcgcacattgcggttgaagtccccgcgcaacccatccagcatgtcgccccgtaggggcatggcgatgctgcgcgtcacctcctcgggatccagcatgcgtgtggcgaccgtgatctggacacccatgttctcgccgaccgagttcaggaaacgtccccaccggtccacgacgtccagctgctggtcctgggtcgcgacctgatagttgatgtcgctgatccgcagcgacacgctccaccggtcgccgcccagatacgcgatcccgttggacagcatcgaatcatagccaagcagctccttcgacgaacgaggtatgcgacgattcccggagcgccggtttccggcctttccatgtcgcttgtcgttgcctttgaccgctttgctgccgttgatgtcagacatgacgacgtgccttccttcctccgattcgtctacgggtcttctccttcaacgacggtttgccggggaatctcgcgggaacatggggttcgagcggatacaccttcgggccgaaacgttggcgcagcatgtatcccagataccgttccggcttcagtcccttcggacgccaccagccccacagcgcgaacggcagacacaccacgaacagcagatacgagcctaggtccgtcagccccaacgaccagaacaacgccgcctccccgccgcccaggacgagcatgcacgcggcggccgccagttgacgccagcccagcccccacatcaccttcgcctcgacattggcgatctccttatacacgcgcatctgcaacatgaaagaatcctttccgattggccccggttccgatgcggctattcgccgcctgctatggcgcggctgacacgctggctcaccgcgatcacgaagaacagcaggatgcccgccatcatgagattgccgaaattgcccgtcacccacgacaccatgcccttgtccgcggaatccgggatcctcacggcatcgaccacgatccgctgatagaacaccagacagacgaacacgcacaccgcattcaccgacgtacgcgcatacgacttgaagaaacccacgccgatcggcttggtatcctcatgcaccagaaacgcgaacggcaacgactgaaacgccgtcaacgcatacaactcgatgaaccgcacatacagcaccaccgtgaacaccaccgacgccaactgggacaacaaccacgggatcaccagcagaaagaacaacgccgcctgccccatcacacctgcatcacggatctggtcgcgcatcagatcgcccaactggccaccctcgcccgccacctcaaaggacatctgcgaggacacgccctgcataaggaactgcgtgacccggttgaacatgccgatgaacagaccggcgttccgcacggcgatgaacaccaacgcgatcctgaacatggttcccgccacgatcttcacgcccagatcacggtccgcctcgatacgagtcgagttgcgcgccagctccaacgtgaacatgaccgcgagcaccaccgacgtcaaaggcttgaccgccacctcatgcacgctcaccgccaactggtaaagggcgggattccacgtctccggcgcctgggacaacaatccggccgtgaccgaaccggcaccgccgccgccgatcatgttgagcatcgccacgatgaagtcctccacaacacgcccccgaaccgactcaacccaacgcgaccgcgttgaagacctgcgcggccgcgatgatcatgcccccgcccacgatctgccacaaccccgactgcgtctgcggcccgttatgatccttcaaaccaccaccgaacgtgaccgcaccccacaccagccacaggccaccaccgatcgtggcgaacctgacgaacaactgaagcacctgattcaacaaatccacgacagacctcctctgacgacgatcaaggagcccgacaggcaacggcctccgttgacacccatcgtcagggaaaaccggtatgataacggcggacaaccatatctgccactgcagagacagcggacagaatgtcatctaaagatgacaatcgagcgggaaacaggaaccgctcaacttgagagctgcaatactgaaaatgtatgtttgcggaaatcgcttctttctatactatatcccgcgtcgaaacgggtggtcctatctatcgtcatttcctaatgaacactaaggactaactatgaaaacccttaaagcaacactctctgcattcttgagtttgtcattttttattgcggctccgggaatcgcattcgccgccgacgcccctccgcgtcctgatatccctaccgattctcgctatgcgaaagtgtatcaggaggctcaggaaacgattgctgaaatcaatcgcaacctaccgcatcttcttgctgaaggtcaagaagctgcacaacacgatgcaaaagccggagaaccagttccacttgctaacagtcttggaacatatggagacatcctagtaagcactcttatagattctggcagtatcgcttttgtcgggcacgccgcaatagtctcttcctcaaatgtgacgacaattgagtcttacgagaagatttttagccctaccaagataggaggcgttcaaagatatcatcaatgattggggttataagagaggagcttttcttgtaaggccttacggagcatcttctattcagttctccaatgcggccgcatatgcagctagacaggttgggaaaccctacagttgggatttcttcaataaatatagaactgatcaattttattgcagccaactggtgtggagggcatggctcagcgtcgggattgacactgaaacaggctccatccccaatggtgtcgtagcgccagcggatcttgtcaattcctcaaacacctatgtggtgaagagagtgtaagtgcataatattttccccatcctcgttttgcatgagggtggggatgactcacgatgaggtaataaaatgagaaatagaagacgcatcgtggcgatggcaatgagtattctcttggtgacactattggctacgtatttgttattgtgctttctacctgtcagctcgcatgagaaatccgacctatctgcagcttataaaattgtatattcggacatgttttcgtcaaataaaggtggaatactcacgattgatgagcaaggcagcattattcatgacgagcctctgggggacttgcagaatgcggctgaatattcatacaaagacggtatttttattgcgggagggcgtcgccataacactcatttgattattgggaaaaatagtaaatccaaactcattcatcttctttcggatcccaattactccggagttatgtcgattgaacctcataacggtggggtttctgcagtaatgaatggaaatgattctcctgaagatgattcatatctcaatctattagtcattgaagattccaacggcaaagtgttggagaagcgtatactgaaaatatataccgaggatcaagtctctacagatgagaatatgttcatcgtcggtcacgaacttacgctgagttccaatcgatatcagggtaaaataatcagatatgacttctcgacggggggtattaccgagaaggtaacagacgataatttactttataatcaactggtcttatggaataaacaacttctagttgttggtactgatcttaatgggttaccagagcagatagatatgtttgacgccagtaccttagagagggtggcaagcatacgattggagtcagactttcattctctcatttctgtaaagggatggccgtggattattggttccacacaagcatgtcccatttctgataattcatatgatattgaccgcgccaaatgtcttgatattccaactataaaagacacccaggatgtcactcaggctatttcctcccaaaacaaagctttcattctcatcagggataaaaccatatcagaggagaatgggattaaagccattgggaacatcttggcaatagataccaaaacaggagataccgtcctcgcgcctgttcatattccttccaacagaagtactgacagtattctcttcttgccgtatccccttcgatgaacagtatgcgtatgacaagaactgtgcttataaaatgatgtgactctgtgtctaaaaaagttgcatagcgaatatgtcttcgtggagcgtccaccattatgcatcatctcctgtctgggacatgtttgatttgccggttgtgagtaattttctacgccgtcaataccgcgagcatgtcttctcgggtctctctgcagtaagactctttactgcagtttgcggagagggtgtcatggccacgctcaatgagatctcagaacgggtcggagtgttgcagaatacggtgtcgagtttgttggacaacccgttggtctccgccatgaagaaaacgcggcggcgtgtgctgtgcacatgcgggtggataggatatcacaacatgttccatctttcgattgaggtattggatgctcgcccttccgcagaagaactgcaaaacacatattttgctaatctgtggaaaactactttataaaagtcacttaaatgcaattagattcattcctcgaacggaattctgggatacagtaacgttgtagaacgtttcttgcgtgcgtcacggatgaacggtaattcgaacggtttgtttttattaaagaagatgttaatcattcaacaggtataaaagtggggctgcactcgtgaacgagtgcagccccacaaatttccgccggggagagaagaaggaagagaaccggcggggttccggccggattggcatccggccggaagaatcatcgcggcggagaacggtccctgccgcttcggtcagaccacggattgcccgccgggaaccgaatccgcggtttcgacggcatccgcgtcggcatcctcggcatcgacgggttgcgtcgtgccggagtggcggccggcggcgttgttcccgcgcctgaacctgcgggcggcgaccagtcccacgccggcggcgagcagggtgattgccgctgcgatcacgccctggatggcggtgccggtgtgggcgagcccggtccggtaaccgttccagtcatcggtgttgctgaccacctcggtgtcggggcagacgagcatgccgtcgatcgtgaccgcgttatcgggcgtggacgtctcgtccttgccgtcgaacggatccgggtcggagacgacgcattcgaccagcgggatgccggtgaccgtgacacggtcggtgtgatggtcggtcacgcccttgaggacgcccctgacctcgatgctctcgccgggcttgaggatatgggtgtcccagtcggcggggtattcgaggtcggtgacttggccgtcgccggcgaccagttggtccttgaggttcaggtccttggttcggtaccatgcgccctgcttggtgtcggggtcggtggtgctggtgttggtgatggtgaacacgatgcgcgtgtcgccctgcatggccaatgcgtccttgacctggtcgcggtcgccggtcggccagccggaggcctcgtcccatttctcgatcttcaggctcggggtcatgtcgggcgtgtgcgtctcgacctggttggacgggcggctggtgccgttgagtgtttcgtcgaaccggttggcgatgtgttcgccggtcttgacgcgcttgcactggatgaacgcggtccatgcctgctcgttttcgtcgttgccgctgacgaggtcgagcatgcgttgggtcgccgtgacggtgaccacgcccttgtcatcctgggcgagggtgaacagttcgccgccgtacataccggcgtcgaagccgctgccggcgatcttcacgcccctgcgggcgatcaccttgccctgttcggtcaggtcgcgcatggcgtacacggcccattggccggtgtactgatcatgttcggtgtcgagcgggtcggtgatgctccagtcggtgacctgctggtaggcgcggtgcgcgggcagcacggagctgtcgagacggtagaggaacaggctgttgaggtacacgctgtgcttgtcgatggattcgccgtccaccttcacgaccacgtccttggaggggttgacgggtttgagggggttggcgacttcgttggtgtccttgcgggtgtcgttgacgacctgcgtggctttgttcttcacgatatgtccgtcggtgaccttgatgacggtcatcggcaggctcacctcgtagctcgtacccagcatcgactggtcgatggccggctccttcaacgggtcgtgggttttcttttcggcgtattccttgaggttcctgggctgggggtcgcccttgatgatctcgccggtggccggcactttcgtgtccgcggtcctggcgtacacgtaggcgacgccgtcgatcgccgcgatgttgaacttcgcggtcacgtccttgccggtagcggtgtcggtgacctcgatgtgcttggcgtcgagggagaggtattcgtcgtcccagtcgtcggtcatgccgagtctccagaccttgtaggcctggttggtctgcttggcgtcgatggtcacgcggtagtagattcggtcgcccagcagcgcggtcttgccgtcgatgctgatggacgggtcggcctgggtgtccttcttcacgggagtgaagtcgggcggctcgttccataccttgttgctcggggtgatcatgttgttcagggtcagggcccactggttgccgattttggtgtccgtgggcgcgtccttggcgaccgtgccctcgaagcggacgatgatgcgcgggttcgccccgttgcgccagttggtcttcacgtacccgtcggagaacacgaggcgcaccgcgtgctgcgcgtcgttccactgggtctcatactcggtcttcgggatgaacctgccggtggacaggtcggtgacctccagggtctgcttgtccacttcaagatgctcgtcgtaggtgtcggtgaccgccacctcgccgaccgggtacgcgagattgccgggcaggtggggctgggtctccagacggtattccacgcgctggcccgggtagacgaccttgccgtccacggacgcctggtcgcctccctgcgaggattcgccgaccacgtccttgacgacgggcggtatgtagccgcagatcttcggctcgttcgtggggatggtgtgcgtgttgacgctctgggatcccttgttcgtcagcgccttgccgtccggcgcggtgcagaacgacagttcgtcgctcgactgcttgccgaagtcgtcgcgcacctggcccgtgcccttgccgttggcgtaggccgccttgcccgggatgagcagcgtgacctgcttcgcggtcttcagccccttcaatccctcgcggtaggtctggcctgcggtggcggtcaccgtggtgccttccatcgtgatcgtccactggtcggtgacgtccctgccgtggttggcgatgtcggtgacgctggactcgcgatcggtgccggcgtcggcctcgtacactctgatcttcgacttgtcgtcggcgtcgaacaggtagtcggctgccgaccagtcgtccgtgagcgtcagggtctccggggcctggatgaggttcttggcgatggtgccgttgactaccgaggcgacccggtccccgtccagaagcgtcatatcgtcggcgccggtccggttggtctccttcgggtcgatgaccgcctcccactggcccttcgcgttcaggcggatccagctcttgtcaggattcggccgccacgtatcgaactgtttctttccggcgtcggcctcgggctcgtggttccactggccccacgcatggtctttgacctgctggaagtcggagggcttcgacacggtcacgtcgaagctgaactcgtagacatggtccatgggcatctcgcccttgtccgccgaacgagcggccgacactgtgttcgacgccttgtcccaagtgatttcgaactcgccggaaacgtcgcgattgtcgtcggtcctgtcgatgagcctgtagttgtccacggagtattcgacgccgttgggttcgatcacgtcgcggaaacgcatctcgtagccgccgcggccggtgccgtatgtgatggtggtgcggttcgtcatccggtcggcgctcacgccgtcctcgatcttcttgaccgggggctcgggcggcaccgagctcaccttccaggattcggccgggtcacggtccgcggtgtccacggccgcctgcatgcggccctgcttgggcacctggatgtcgatccagtacgagccctcggcccagtatttcatgccgaaatccttcggcgaggcgagatcgtcgagctgagtgtccccattgctggagaagctgatcggcttgctcacgctcttcgcgggcaggtaggggccgttctcgtaatggatgatcgcggtgccgttcaacgtctccttgatcgcggaaccgccgttgtcggcgtggatgacgtcgccgaccgggtcggtggagccgacctgcatgtcggtcttctgcttgtggctggtggtcacgttcagcttgtaatcgaccggcggctggttctgcgccagcacaatcacgcggaacgaggcgttcgggttggagttgatcgactcctgcgccagagagtcaacgctgcgtgtgccgagcttgtccttccacgtggtcgaggtcgagtacttctgcccctgatacgtgtagtcgcccttcgcctcggccctccactgcgcctcccaacgattcttcgcattcgaactcacatagctgccattgaacaagccgttcccgagccgggcgtatccgacggccaccatacgacagtccgcgtttccctcacccgtataggagcgccggcactcatcgatcgcgtcgctcaaggtcttgttcatgtccacgtactcgttcgcgccatcagacaggtccgacgacagcgtgacgtttgcgtcgcgcagcgctgacttcatgccatccagcgtggccggccatgaatccttgtagatccaatgcacgtcggcggtctgagaaggaccgccatggtcgcctccgcctccctcgccggaaccgccaccgccgttatcggccaacgcaaccggaaccagacatgtcagcaacgccgcggctgccgtgattgacgccaccgcgccgatacccttcttcccgaacctcatacgaaatcctttcccacatgcaatcacaagcccctctccgggaaagggaggagacggggactccagaacccgcctcctcccgggtccctggaagaaaagcacgcccgcaagcccgacggccggccgccggaccccgaacgcaccatcagcatcaccccgcgtcgggttcctctgcggcggacaaacgttgcctcggtcgaaccacctcatcgtggatcggggctgttgtgtcgctccggttatgatctgattacgaaacgcggtggtatgcacacaggttacgctgtataatagtcatgtatttcaattaaaaattgattattgtgagttttagagaatggcaatgtgatgattcgtttgaaaagacttgttctggatgacatgaggaacatatcgcatggcgtcttggatttcgatgatctgcccaccggcggcagcgtcacgggtatttacgggcagaacgggtcgggcaagaccaccgtcatcgacgccatcgggatactgcgcgcgctgttgtccgggaatatgctgccggataccgccggtgatgtcgtcagcgccagcgccggttcggcgaccgtgacggcgacgttcctcattggagataagcagaagccgagctatcttgagtacagggtgtccatgcgcaaggcgaatccggattcgacgcgggcgcgcgtcgtcgccgaatcggtgcgtatcggcgacgatccctcgcgtttgggccgtgaggtgctggggcatcgtatggaggattccgaggcggacgggttcgtgtcgaccccggtctacgtgtggcgttccatcgaggcggtcagttcggtgaagaccgtggtctcgcgcaccgcggaccgcgcgtacatggaagggcgttcgttcctgttctcccggtgcgccacgctcgacgaccggccggacgccgagttcctgatcgactgggcggtggcccgtgtgcgggagacgaatggcgtgtcctccaggtcgttgacgtatatcaacgagcgtttcggcgagttcgtccgcctgcgcgagacgctgtgcggttacgcgaccaacgacatcttcgtgtccaccacccgtcgtggctcctacgccgcgttcgcgatcatcccgatcatggaggagaacccggaaggccgcaacacggaattcccgttcgacctgctgcagcccaatccactgacccccggccaggcgaagcggctcggacagaccgtggagtccttcgaccgcatcctgcccaccatcgtgcccggcctgcacgtcctgctgaagaccggcaccgcgccttccggcaaggacggcgaggaccgggtcaccgcggaactgttctcgcgccgcggcgacgtcatggtgcccttccgctgcgagagcgagggcatcatacgcatcaccgcgctgctcggctacctcaagcacgcgtacaacgacgagaacgcgctggtcgccgtggacgagttcgactccggcgtgttcgaactgctgctcggcgacatgctggaccagttggcggacgggtgcgcggggcaattggtgttcaccgcccacaacctgcgtgcgttggaggtgttgccgaacagctgcattcgcacgacggtgaccgatcccgacaaccggttcgcgaccatcccccgtaagtcctccacgaacaaccagcgcaaacggtacctgacagccagcgagcttggatggaacggccccgacatctatgattcgcccataccgcgcatgttcggcaacagcctctacgccgccggccaccccgacgaggacgacgacatcgacgacgatctggcagcactcaatgccgccgggacggaggcggaccgtggctaaacgcaagatcgtcctgctggtcgtggagggcacgagcgacgccagcctgctcgtgccggcgttctcggcgttgatcgagaaccgcctgttccaaggtcaggaattccattgcgacgtgctgaccgcgccgaaccaccgcgaggaattccatcggcgcaacgggttctaccccgcggacaaaccctcgcaaacggtgcgcgaactcgttgagtattatctcaaggaccatgatcgcacatggggccagctcggccatgtcatccagatctgcgatctggacggtgcgttcgcgcctgacgacagcgtgcgggagaacccgtcagcggaagaaaccctgtattcgacgaccgacatcgtcaccacgaaccgcgacgctctgatcgcggaccggacgaccaagcgaaacggcgtgggctccctgctcaaactcgacggattcaggaagaagcagggcggtcgcaccgtcttgattccataccgtctgttctatgtcagccgcaacctcgaacacgcgttccgcggcaggaccgacaacctggacgcgcagcacaagcagagcggcgccatcaaactggccgaccgcttcacacgggacccgaacctgttctcgacgactctccaatccctgcgacgcatacacggcaacccggccacttgggaggaatcctggcgatacgccatgcaggacttccactcactcgaacgcggcagcaacctcgccttcgtggaaccatacctggcaggcgaactgcaataggtcatccgtagctggatagcctggagtcgcattagcaatcctaggaccatccggctgcggacacgaattatggttaagaatatggacttagagtatttgtaacataacgcagaggtcgtctataacattgtatttcgcatctatttcagtttcgacaaatgcgggcatgatgtagataatgaggactatatggaacgcggattcgcagtcgataagacattgtcgatgaattgcagatgattacgtacaaggaagtatacaatatgataatacatgaaaaacatatctccgcaccttataaaagtccgctatatcgcaataatgaatatcatatttcggttggtaatcagggaatcgacctagatagtatatataatgacaacaaggttgaaaacgctgaatttttacgatggcttggatatgagtctttctggcttattattggaataatattatcctctatttcggccatagcccgtcattataaggaattatctttaaatgagttggcagaaaaatcttcttgggataagacggaatctatactaaaagctttcccctgttttgcagaagatgcaggcctgtctattatcctcgctttattggcgatagttgcgggtctttccgtgggtatcgcagttgaggatctttcaaaaaatcatatgtttagattcagatctatgggtagaacgctcatacgattcagtaatctttccgtctgctttctcggcctgtcatccgctagtctgattctccggtatgggaaaggacttggtgttcttcttatttttggtttattgttttgtttcactatgctttacggcataggcgatatatctgtgaattatcgtactcgattgaaggaattatccaatagattgcacgaagcggaaaaagagctatgcaatgtcgccaataggaaaagaaagcgctatgtgtttcgcagtgtaggaagatggaataggactcttaatagtatcggattgtcgtttgtgattctggtctatgtttgctcatccgtgcatcagcataagttattgttggccaatttggtgatttcttttacattggttgttttttactggttgtcagtttacgttctaggaagcatcctttatgattcaataaaggtgtttgaaggattgacgaaagaaattcgtccactaaaaatactttatcgtattgcattgtcagttttctcatttaccgcatcaatgtatttgagtatgatttttattcttacgtctcatcaatgcctgttttatgtaagctgtgttttattgtttatcctattgctttatatctgctacttttctttatcgtcaaaaaataggcggttcctgtttattgaaacaagaaccgcaaaactaaagaaaaacgtcagtttaactcggcgacttattggcctaatgcaatctgaggaacaattggtttaattgggttaattttctatatttatcaaagtgattatcgtccgggtcatgtatatttttttaacgttttaatgacgcagatagcgaaagcgccaatgatagcgatggcggcgaggattgccagtcgcgtttcacggcgttccctggccgccatgtcggcctgccggttggccagggcctcggcttcggcggcgacgccgctggcggcgatggccgcgatgtgcgcgctcatctggtcttcgagcgtggaatcctcgctcgtgccatcgaagggcgcttcgtcttcgttgtggttgtcgttcatggttctgctccgttcctgattgttggattgtttgttttcctgattgttggcttgcttgattgcttgcatgtccgattgcctgcatgcaatcaagtttgattgtttgattatctgcatgcgggcttgtctgcttgtcagctttcggcttgtccggcgaggatggacatgcgggcggcgatgagcgcgtgacgtgcgatcgccagatagagctggtggccctcgccgtcgccccagaaccggtcgaaccgttcggtcggcatcatggtggcgggatcgaacccgttccacacgccgccgcagaacaccttcgccgccgcgttcacctcctcgtcggacggcatgcccggatgcccctccgcagcgttcgcagccgcgcgcatctgcgcaccgaacacacgggcctgcaacggcgaaagcgtgtatgccagacccgccgtggaacccgcgggaaatcccgtgctcacgccgagggtgatgacgtgcgcctcctcgccgatgctgatccggtcgccgagcgcggagacctccatcgaatagtccatagtggctcctttccgcagacgcggcgcgtctcatggaatcgtgtctgcaggttgattgcttgaatgcttggtcgttgagttgtttgcttgctggattgcttgattgcttgattgtccgacggattacggctcgtcgtcgccgccgagccggtcgagctcgcgctcgatagcggcgcgcaggagctgctgcatgggcaggtcgtgcgcggcggccgtggtcttgagccgggtcttgagcgacacgggtatgcgcaatgaaagcatgaccaacggttcgcccgcggtcttggaggtcttgttctgttggcgcagcacgtcatcgaatggtaccggtcgtgccagcggctgataattgccctgcatggtctcctgctttccggcgatctgctggagttcggtgacgaggtcgcggtatttgcccagctggtgcgggttggtgccgagcgaacgcttgtaggactgggccttcggcacgatcgtgtcgaaccggggcgtgtccatggcgttgagggcgtccatggtgtcgtggaacgccttcgtgctgcgttcggccttgaccagcagcagcgcggcgggcgtactcatcctggccatgtcgagggtgctccatgcctgctggagatccatgggcgagtccgatgccggcacgatcacgaagtcggccgccttgatggccatgtccagggtcggcccctgcggcggcgcgtcgatgatcgcccattcgtccggatccgatcccgcggcgagctggcggagcgtggcctggttggcgggcagcacgtcgaacgtcagcgggcccgcggtctgttcggcggcggaagcccacaggctcgcgctggactgcggatccgcgtcgtacacgacggctctgcctcccctggacacgatgaccgaggcgatgtagatgctggacgtggtcttcgcgaccccacccttggcgttggctatggcgatgcgcattcgttcttctcctttgcgattgcctgtaaccatgcaagcctgattgtctgcttgcctggttgtttggattactgcttgtttgattgtctgattgtccgacgtggtcatgtggggcgtgatggttggcccgtccggcgtgcgcgaagacgccgttgctggcgttcggcgctggcctcgccggtggcctcgtcgaacacgttcaggtgggagcggatccagtccgtgagcagccgccagcgctgtggccacggcaggctgcggtcccggcaggggacgccgtcggcttcggccatgcgcgcgatcctgcgccggtcggtgcacaccttgcctccgtacacgccccattcgagtccgccgctggcggcgtaggccaggcagtcggcgcgtaccgggcactgttcgcacacggccttggcgaccgaatggaacgccttcgcgtcgtcgggccggtgctcgaactccaacgaccacaggtagtcggaccacggctgcgggaagtcgcggcattcgccggccttcttccattcttcgagacgattcccgtccccgctcatgaccgtaccgcctcagccggtgcggcggttttggtcctgctccgccctgcgacgtcgtgggtggcgtggttgcgtttgtcgtacgcgcataccgggcacgcctcctgcggaacggcgccctcgatgtgctcctggcatagcgaggtgcgcagcagcgccgccccgtagatcggcacgcggcttgcggacgatgagctgaccggtatcgcccggttgggatccttgacgaccggcagcggagtgtcgggtgcccgtttgcccgtcgggtcgggatgggtgagcatctccagccgcagctgcacgtagttcgcggcgaacctggcaccgctggcgagccggggcagccagtagcggttgcggtacgcccagtccatcgtcgcgacgacctcgccgtacggtcggtcgatcagcagcgagtgaacggccttgcggtcggccatggtcgccggcacgtcgaacctctggtccacggcgagcatacgtcggcggatgccgtcgagcacgcgcacctcctggtcggcgcgttccgtgaccggttcgggcagcttgcccgggtcgggcacccacagcgggttcctgcaaccccttggaggcaatgccttgccccaatcggtcgtcggagcggtttcgggattcgggccggcagccggctgtgcgctggcttgttcgtcgttgaggggagcatccccgaaggggatgaggggagaattgtttatcacttgtctattgggtgactttctgtccaagattccgggacaatttgtccgcggtcccatgcccttcggctcgggtgacgatccgtcgggtgacaaattgtcctcgtctgcttcgggattgttttcgcgatcggccagcgcgtccaggttccggggcctctcctcgatgttctcgacggggcggtcgccatccatgatgacatcccacacgcgcgaacggtgccccttggcgatcggcttgcgggtgcgcgggttgcgcgccgacatctcctgatcgcccggcctgatatagcccttgcgctccagctcctgcaacgaacggatcacggtgcgctcacagcacccgcagttgaacgcgatggtcttcacgctcggccacgcggcggccccatcgtcgtagtaggcgcggcgggccaaatacaccagcacgaacttggtgatgcccttgacgtcgtcgcgctcccatgcccagttctctgctctgctgctcatcgatcgacctccccgtcgtcatgcgacggatccgcttcacggcgttcacgcagcctctcgccgatgtcgtcgctcaaacgggccgcgcggcaaagagcgtacgagagaacgccgccggatacgtacacggcgactgcgaccaaccaccacatggttcggccggtatcagggaaacggtcctcggacgcgcgcctcaacggcgcgagccccgggacggatgggcgagcatggacagcacatgcgccttcgcgatgcgcagatcgacgttcccgccggcccgtgctgtccgccgcgctgcgccgcgcgtacggataggctcgaaatcatatgccggacgagcgccggcgatattggtagaatcggtcatggtgatgaccctccttaggggaatcggaacggcgggcgtctgatcttggcggatatgcgcgcccgcatgctccatggttgttgccgttcaatccccgcgccgggttccagccggttcggggattctcgtttcgggtttccacccgccgtccgtgagataggcgtcgatgccgagcacgtaccccggggacaggtttcggtgaatggccagccagaccaggtcggactgctgccacggtatggagccgttgaccttcccggcgaccgaggatttggatttgcccatctccctcgcgagggcgcggcagctcagacccgccgccaacatgtagcgacgcatcggagaatccattattcctgctttcagtccattcacgatagacaatatatcaaggaacttgcgtcgaagcaaatcgctgttgtaggattatgtccatcgatattagacgactgcaatatggaggaacttgatatgacgaatgtcgaatcatcgcccgagatcaatggactcggcgactacatgcagaaggtgttcatctggaacgtcaacatgcagctgaccggacgtgggatgaaccagcaggccctgtgcgctccgttggggctgaagaagggtgcggtgtccgcgaagatgacgggcaagaccacctggaccattcaggacatcgccgcggtggcggagttcctcaacgtctcgcccctctatcttctggatgcgacgatgtacgagcagatgatgcgcggaatgagcggcgacggaggtgcatctttggtggcagtggccaccgccgggtttcctgtgcgcccgtctgaaggccaagctgacggcctgaaaccgttggaaacaaaaggctccgggccacgatacctcgtggaaaccggagccggtgggtacccccagagagagtcgaactctcgttgtcagattgaaagtctggtgtcctaaccgttagacgatgggggcgaacaactcgaattactttacgggaggttgttcggttatgcaaatcgacggcatttcggcgtgtcgcaatcagttcagggtaacggcctgataggtgaagtcatgaatcacgcggccggcggccaggcccttcttctcgaagttggtgagcacgcggccctcgaatcgctcggattcggtgaagtcggcgtgcggcatatcggcggccatgtcggcattgcccttgcccacgtgctccagcggcaggctgacggttacgctgcccaggttcttccagccatcgaggccgtccatcacctcgtgcacgtgcagggcatagtcctcgatgtcggtggcgatacgccagacgccgtctgtgaccagcgcgcgatgaatgtcgccggccatggccttctgcacgatgcggcgcttgtggtgcttcttcttgggccaagggtcggggaagaaggtccatacctcggccacggtgccggccgcggtcaccttgaacagctcgggcgcattgacctgggccacgcgaatgttggtcagcccctgcttgccggcgagcagcagcgtgtgggccacgccggggtcatagacctctagagcaaggaagttcgtctccgggtgggctgcggctgctgccaccacgttttctccctgcccggtgccgatttccacaatgagcggattatcgttgccccatgcggactccacgaacgcgcggtcgagcgtgacgccttcgcgcacgtccaacaggttgccggccgcaatatccaacagatatgtgccggcatagttgtcccatgcgcgctgcaggcgatcgtccaaacgtccggagcggcgtacgaaggagagcaccttgtgcagggggtgcgccggtgcctcggtgtggtctgtgcccatcgcggcgacgggatcgattgctgtggattcgggattggtcatatattcctcggattttccttgtgcgccgcaccgctgttcattcattaggtcgatttggcgttcattaggtaggtggtgtgcgataccaaccaccatatcaagccgtttacccggtgtccgtgcgggccggctccgggccgacctacctaatgaacgccaaatcgacctaatgaatgcagatattgccggacgacaccaccgttttgtgcgattatgttcgtgtgatatactcaaattgtttcaaaaggtaacaaagcggaccaaaagtgaacagccgctgaactccccacggccgacacttgcaacccgcacaaggaaaggtcaactatgacagttctcgtcaccggcggctgcggctacatcggcgctcatgtcgttcacgcactccatcaggccggcgaaaaggtcgttgtcgtcgacgatctgagctacggcaagcccactcgcatcgaaggctcccgcctgtacggcatggatatcgccgccccgggcgccggtgagcgtttggccgaaatcctcgatgccgaaggcgtcgactccgtgatccactttgccgctcgcaagcaggtcggcgaatccgtggagaagccgctgtggtactaccagcagaacatcaacggcatgctcaacgtgctcaccggcatgacccagtccaagaacgccaagaagctcgtcttctcctcttccgccgccacctatggtgtgccgccggtcgatgtggtgcctgaggacgtcgtcccgatgctgccgatcaacccctacggccagaccaagctgttcggcgagtggatggcacgcgcctgcgagcagccgttcggcatccgcttctgcgcgctgcgctacttcaacgtggccggctgcggtccggtggagcttgaggatccggccatcctgaacctcatcccgatgctgttcaatcgcctcaagcagggcaaggctcccgccatcttcggcgacgactacccgactccggacggcacctgcgtgcgcgactacatccacgtctccgacttggccgacgcccacatcgccgccctcaagtacctcgaccgtgacgagcgcaagtacgacgccttcaacgtcggcaccggcgaaggcacctccgtgcgccagatcgtcgacgaagtcaagaaggtcaccggtctgccgttcaccgaggctgtcatggcccgccgcgccggcgacccgccgcacctgatcggctccccgaagcgcatcaacgaggagatgggctggcatgccaagtacgacgtggaagacatcgtcaagtccgcgtgggatgcctggcaggccaaccccgaacaccacatcgacgtcgacacctggaagcaggctgactgagattgacggtcactttgcggtggatgccgcgaagcgtttccgtccataagggcgtggccggggttccggtcgcgcccttcgtcgttttgtggatgtttgtgacagacgtgttcgcgtgctggtgatagcaaaaaccttgaaattatgcggaacacgccgaagtttgcatgactggcgaatttcagtaatatatacatctgttgcctcacgcaagtgagaacaatggccccgtagctcagttggttagagcgccgccctgtcacggcggaggtcaccggttcaagtccggccggggtcgctggaatggttatgaagcccggattatccgggtttttgactgttcatggctctgtagctcagttggtagagcgagcgactgaaaatcgctaggtcaacggatcgacgccgttcggagccaccataatgaagccccgccttgtgcggggcttttgcatatccgtcgcgtacctactccggcgggggttataggccaaaatggcgggctggccggtcaatgcaaaggctcgcgttcgccaacaactgtcttcctcgccgcaactacgcacgccaacagcaccaatgcgaacatcgatccgaacagcaacccggtcttaagactgtcgccattggcagaggccaccagtcccactacggcagggccgccggcgcatccgaggtcgccggccacggctagtagcgcgaacatcagcgtaccgccaccgggcatggcgtctgcagccatcgagaacgttccgggccacataatacccactgaaaaaccggtgagcgcacaggcaagcagacccagtaccggtgccgtggttagggctgcggtcagatacatggccacgcacagtacggaactgctggcaatgaatgccgtgagatccagtcgatgccccagcactccgtaaatcgtgcgggacaggcccatcatcagggcgaatgcggcaggtcccgccaagtcgccaatcaccttggtcacgcccagaccggactcggcgaacgcgctggcccactggctcatgccctgttcggccgcgcccgcgcacagcatcataaggaacatcaggtagaacaccggcttcttcgacaagtcggcgaaccgcatggtcgccgtgccttccggcacaatgcgcggcatgggagcgccagcgaacatcgcgatgccgatggcaggcacaatcgcccacaagcaagcgagaaccggccatgagccggtgccgaacgcaaacagaaacagcgtggagatggccacggtgccgagctggccccagcagtagaaggagtgcagcaggctcatcgccttggccttgtgttcgctcgggcaggcctcgacgatgggggagaccatgacctcgatgagtccgccgccgagcgcgtagaggaaaatcgccgccagaatcgcgagatacgggtccggcacgcgggtggggagcaagcccaacgccagcagtccggcaagggcggccaggtgggcggcgataatgcacggcttgtatccgatgcggtccacgaacttgccggccagcacgtccacgaccagttgggtgacgaagttgacggtgatgagggcggaaagccgcgccatgtcgatgccgagtgtcgccgcgaacgtgacgaacagcaacggcatgaagttattgattaccgcctgagtgatgtatcccacgaagcaggcggtgacagtgtggttgtagttcggggctgtggcgctcatagagtcagtattgcagaaaaagcacctgcgaaatgcgcgtgcgaagagaatcgtgtgggacggcagatgaacaatggtaaaaaccgcgtgccgtcccacaaaaaggaatcaggcctgccaccattggcgcagggggtaccacttgccgtccgggtgggccacgcgatccggcttgacggccaagaactggtgaatctggatgccgtcgagctcgaagttcagagcgcaggcggccatgtacataccccataccttggcgcgttcaaagccgacctgcttgaccgcgtcgtcccaatgctcggagaggttctggttccagtgatgcagggtgagcgcatagtgctggcgcaggttctcctgatgcaccacgttgaagccggcgtcatggatgcacgattcgatgaagccgggcgcgccgaggtcgccgtccgggaagatgtaacggtcgaggaattcgtcggtgccgggcttgccgtgaggcttgtcatggctgatggtgatctggtggttcagcagtcggcccatcggcttcagaaggcggaacatctcttcgaagtagctctggtagttcttgacgcctacgtgctccatcatgccgatcgagcagataccgtcgaagtcatgctcaggcacctcgcggtagtcctgcacacgcacttcggccagatcctgcagcccttcacaggcgatccattcgttggcgtacgcggcctgttccttggaaagggtgacgccgagcgccttgatgccgcgacgggcggcggtgatgaccatcgaaccccagccgcagccgatgtccagtaagcgctggccgggctgcaagtccagtttgtcgagaatcaggcgcagtttgttggcctgtgcgtcttcaagactcatgtgctcgttgtcgaataccgcgcaggtgtacgtcatggaggggccgaggaagtcggcgtagaactcgttggacatgtcgtagtggaagctgacggtttccgaatcggccttttctgtgtgcggcatcaggccacgcttgatacgggcgaacttgctcgggccctcggtggcgggcaccggcggcttcttgaagccatggctcaggatgccggcagatacgcgggcaattgatgtgggagtgagtgggcgaacgtatttggacagcgacaccagcttgcgcatcgccggatacgggtcggcgtagtcaatgccgtccacgtcgaaatcgcccagaatgtatgagcgcacgatgccgatttcattcgggtgcgcgagcagctggtacatgcagttcggcgtggcgattttgaccttcaaatccgcgtctgccgggccgaaatgcgagccgtcgaaagcgtcgatacgaacgggagtggcggggtcgagaaacagggacgccatctcgccgaccgtcatagccttgccatttgccattatctacctcattctcttatgatgatcaccccaactgtcgaggtatcttagtcctcttcaggagactgaaaccgttgaatacaccatctggtgaaccagttcgcgttcggctgatgaagcacgaatggaattaggcatctcgcatattgattgcgctacgcgcgaagtaagcggatgagagacgagtttctcggagagcgtcagatgactccggaaaatggtcttatcgttgagatttcgggcgatggaactggtttggtcaatggacaataattcgacaagtgcggaattccgccatttcttgccattattttcagtgttgttctttcagcgtgttttcaggtgaatgctcatgcgcggagtagactggggaaccgttggaccactcaaagacagagtggaccaccagttaagacactagctcaaaaggagagcccctatggtgtaccgcatgattttcaaccagactgcatacttcggacgtggcgcgatcaaggagattccggccgtcgccaagcagcacggcttcaccaaggcatttatcgtcaccgacccggtgctgctggagaccggcaccgccgagaaggtcaccaaggttctggatgaggccggcctgccgtacgaggtgttctccaacgtcaagccgaacccgccggtcgagtgcatcaaggacggcgtcgccaagttcgccgagtccggtgcggacttcctgatcggcctgggcggtggctccccgcaagacacctgcaagggcatcggcatcatcaccgccaacccggagttcgccgacgtgctttctctggaaggcgtcgcggataccaagaacccgtccgtcccgatcttcggcgtgccgaccaccgccggcaccgcctcggagacgaccatcaactacgtggtcaccgacacggccaacaagcgcaagttcgtggctgtcgacccgcacgacatcccgatcgtcgctttcgtggacccggatctgaccgactcgatgccgcgcggcctgaaggtcgccaccggacttgacgccctgacccacgccatcgagggttacattaccccgggtgcctggagcctgtccgactgcctgtccatgcagaccatccgcatgattgccaagaacctggccaagtccgccgacggcgacattccggccggcgagcagatggcctacgcgtcctacatcaccggtatggcctactccaacgtgggcctcggtctggtgcacggcatggctcacccgctgggcggccgtctgggcgtggcccacggtgtggccaacggtattctgctggccccggtcatggaatacaacaaggacttcaccggtgagaagtaccgcgacatcgccgatgcgttcggtgttgaggacgcctacaccggcgacctggagaaggtgcgcgaagaggccgtgcaggccgtccacaagctgaccgtggatctgaagaacccgaccacgatttccgaagtgggcgccaccgaggccgaccttgagccgctggctcacgatgccttcaacgacgtgtgcacccccggcaacccgcgtcaggcaaccgaagaggacatcctcgcgatttacaagtcgctgatgtgatcagtcaatgacagtaaacattagctccctctgatgagggagctgtcagcgtagctgactgagggagagaagttgcggcgtagccgctgaataataggtatcggcctgcgtccgattcaatgttttagcgactgcgtcgcagtctcttcctcagtctcacttcattcgacagctcccttatcagagggagcttgcataagcagagagggctcgtatatcgagctacttttcgtgcttttcgtcgtagacttcgtcggtgggggtctcgtcgtacagctgcttgccttgcgcctccgccagttccatctgctcgttgatccacgcggcttcagccggattgatatccgcggaattcagcactttctgccacaccgggtagaacatatgcatcgccggatacatggcggtgaacaacacctccggcttatgcgtgcgcgtatgttgcggatgcgcatcaaacgtattcttaaaacgtcgcatgtagctcaggaacgaactcaacgacgtatccatccgtcgcgcactcatcgcggcgatcatgcgcggcgagtacacggttttcagatccttgcccatcagatgcagggaaatatcgatatcctcatgcatcacatcggccttatcccggcagacctcattcgcaatctgatgccaggccgaagcgcgcaaggccatattcgagccgaacagcagcggctggccgccatcggcacggtagattcgcttgcgtaaggaattgtcgcctttcaacccgaaatggcgtgagggcatgtcgtaatacatcaccggaccagtggcacccatcgcggccgggtcttcggtgaagatgccggagaccacctccacccagtcaggccggatcatacagtcggcgtcgaaacggcccagcacatcgccggtcgcggcgttcaggccaaagttgcgggtgggaatcagcccctgttcatcgttctggtgcaacagtttgaccggggcctcgggatgttcggcaatgaactgttcgacaaccgcacaggtgttgtccgtagaacggttgtccaccaccagcacctcatgcggcatgatggtctgacgggtggcgttcagtaggcagtcgcggatgcgttcggcttcgttccacgctgggatgatgatcgaaacgttgagcataacatcaacaatagaaaagcgggtgtacgccgccggcgtatccgagcttcaaacccctcgctacaatggggagccatgagcgaacgcgtgcgaaacgtaaacagcaccgacacgtcgagaaccggtgccgcagaggccggggcagacccggacgacgagaatcgtatcgactttggtactttgttccccgccaagggagattcccgcaggccaccggaatggttcggccgcgcgctgctgtatgtggccctcgccgtcatcgtattcatgttctgctggcgctcgtggggcgacatctcctatctggtgctcgacatcatcatctcgctgttcctggcgctggccgtcgaaccgttggtggtggcgctggtggctcatggctggaagcgtggcgtggcttccgccgtcagcttggtgggcgtggccgtggtcgtgggtgtgctgctcacgctatttggcaacatgttcgtacagcagatgattgccatggtccgcggtttgccggccatgtatgagcagattcgtgagttcgtggaccagtatgccacgttcaagatgccggaaatcagcaatctcggcatggaaatcttcaacaatatccagacctcgtgggtcaccgattttgccggtaccgccatgagtacggtgggcggcctgttctccttcctgctgaacctcatgaccgtggtcatgaccacgtattacatctccgccgccggccccaaactgcgccgctccttctgccagtggctggctcccaacacgcagcgccgattcctgttggtgtggaccgtggcccaaggccagatttcgtccttcctgttctcccgttcgattctggcgttgatcaacgccacctgcactgccatcttcttagagattctgcatgtgccctactggctgccgttggccctgttctgcggcgtggtatcccagttcatccccacggtcggcacctatatcggcggcgcgctgccggtgctgttcgcttggggcaaccgcggatggacgtacgccgtggcggtgctggtgttcatcatcgtctaccagcagatcgagaacctgattctctcgccgaggatttcgcagcgcacgatggatatcaacgcggccgtcgccttcctcgcggtgctggcgttcggctcgctgttcggcgcgtttggcgcgttcctggcgctgccggtcaccgcatcgctgcaggccatcttccgtgcgtacaccaagcgctatgagctgattgactcaccactgatgaacgatccgactccggagaagaagtccaagatcgtcgaggcgtccgaagcgttcggcgagcatgtgctgcagccgatcggcgagcacatgccgcgtgcggccaaggggtccaccagccgtgtgccgatgaatgaggaactgcgtttgctgcaggaacagatctatgcgattccgccacacgagacgaaagaatccgatttggacgattccgccaccgtggcgattccgcagcgtggtgccgcggatacgcagcagtctgagcagcccaagcaacgcaagcaaaccaagcagtctgatcaatctgcctccagcaatcctagggcggggtggcgctgatgaccctgctttccgtactcgatattcttctggtaatcgtcggtggtgccggcatgatatatcagggactgtgcatcgtgatgtccctgttcgccaagcccgtgcgcttccccgacgccccgatgaccaaccggtatgccgtactgatctccgcgcgcaacgaagaaaacgtgatcggcaaccttattgggtcgattcgcgatcagacctacccgtccgacctcatcgacatctggctggtggccgacaactgcaccgacaacaccgccgacgtggtgcggtctttgggctgccatgtggtggaacgccacaatcttgaactggttggcaagggatatgcgctgacgtatctgttggggcatatgctcgacatcggtgtggccgatgattatgaggcctacttcgtgttcgatgccgataacaagctggacaagcattacttcgaggaaatgaacaaggcgttctgctccggattcaagattctgaccagctaccgtaattcggtgaatctggcggataactgggtgtcttctggttctgcgctgtggttcatccgtgaatcgcgattcctgtctaactcgcgtatgattctcggttcctcttgccatgtgggcggtacgggattcatgttctcccgcgaggtgatgaagcggaacaagggatggaagttccatctgctcactgaagatcttgaattcactatggattcgattctgcatggcgaccgcatcggctattgcggtactgcgatcctctacgacgagcagccggttaccttctcgcaaagttggcgtcagcgtttgcgttggagcaagggattcctgcaggtattccgttattatggctcggcattgctgaaacgcgcggttcgcgaacgtgatttctcctgcatcgacttcacattgatgctgtgtccgtttaccgtgttgggcgcgattcgcgcggtgatgggcttgctgttcgccgcgtgtggcttcgtgagttggccgagccagctgcaatcgctggccgattggtccagcggcatcatcatatcggtgttgggcctgatggcattggctgcattgaccatcattgtcgagcgcgaccagatcggtgccacgaacaaggagctgctcgcctatgtgctcagcttcccgatttacatgctcagctacgtgccgatttccttccaggccatcttcgccaaagcccagtggaagcccatcgcgcataagggctgaccgagtccgctagtccggagctgctcagcggggcaatccaacagcaacccggggtgctgcgctgagggttgactggtgggctagagtagatgcatgagcttagacaatactcaaaggaatgtcggatttcagccgccgatgatgccagccgccgctcccgcgtcttcgcagtcgcaacagccacagccgcaagcatggccgccgaacccgaatgcggcggtgtccattcgcggcctgttcaagcacttcgaccggaagatcgccgtcaacgggctcgcgcttgacattccaatcggctcgttctacggactggtgggccctaacggcgccggcaaaaccaccacgctcaatatggtgaccggtctattggtgccggacgccggcaccgccatgattctgggccatgacgtgtggagcgacgtgaacacggccaagcgcatgatcggcgtcatgccccagcccgaccagatcttcgaccgactgaccggtttgcaattgctcgtctactccggcatgctgcgcggcatgagccgcgaggagaccacgcgtcgcgcccaggacctgctcaatgctttcgacttggccggggccgccaacacgatggtcaccgattactcggccggcatgaccaagaagatctgcctggcctccgcgatgattcacagcccgcgcattctggtcttggatgagccgtttgaatccgtggacccggtgtccagcgccaacctcaaagacattctcatcgaatacgcgaagactggcggcacggtgatcatctcctcacacgtgatggcattggtcgaaaagatgtgtacgcatgtggccgtaatcaacgacggtctggtatgcgcggccggcacggtggacgaggtcgctgctggcgaagaactcgaagaccgcttcctgcaactagtcggtggccgccacgaagccgcccatctcgcgtggctcgatggcgggcaggcccaagcccaagcaccaacttcggcccagacgattcagccgattctgcctacgcccgccacacccaccgatgaggcccgccgatgatcagcagcgccatcaccctggtccgcctgcgctggacgctcacgctcgccaccctgcgaaaatcggcgtggcagaccgtcgcctatgtcttttccgccgtactcgcggccggcaccatcatcggcaccggcgtgctcgcatggttcatcggcatactgccgcccttcaccgtgaacgcggatggctttccgctgaacatccttggttccggaggcatcgtcaacatagtcgtcgtgctggtcggcgcgaccatgaccatcctcatcggcttcatccagctcatgatgcttggcgaaggctccaccatgaacccacgcaaattcgcgctctacggcatcgccgaccgcaacctgcaattcggcttgctgctttccggcctgtccggcatccccgcccttaccggcgtggcctcactgatgctctggacactggcctatcggcatatgggaccagccgtaatcatcagttccctcctcgccgcagtgctggccgtcatcaccatgatgagcatctccaaactgctcatcgccctattcaccacgctggtgaccagcaaacgcggcaaaggcgcgttctatatcttcatcgtgctgacgttcgttatcatctgtcagttgccgaacattctggtcaactccggcgtggccttcagcctcaacaccgaaacctggggcgcggcgaccaccatcgtcgcatggacgccgttcggcgcggccttccaactaccgttcgacgcgcttaccggagcctgggcggtgctgctcgcccgcatcgccatccttgccgttacatggattgtctgcttcgccgtctgcacctggtgtctgagacatgaacggctcaccatcggcgcaaacagtccgtccgagaccgccaaaggcatcggcgcattcgcatggatgcccgattcggcatccggcgcggtttccgcacgcctgatcacctatctcaaacgagacccccgccaagccatgaccttcgccatgccggtcctgttcctgatcatcttcgccttccaggcacacggcatcagcgcggtcgtctggcagtcgctgatctggtgcggctggttcatgtccgtcgtggaaagcaacgggctcgcatatgacggccgcggcttcaccatggaagtcatcgccggcgtgcgtggccggaccgacagaatcggccgcgtacgcgtctacgtcggcatcatggtcgtctacatggtgctgctctatctcgccggcatcgtgctggtcggcgcactgaccggacgctgggcgcagcccgatgacctcgctaccggcctgatcttcctcgccacgggcatgggcatcgccttgagcggactgggcgtggccgaagtcacctcctgtgtactgatgtacccggtcgcctcaatggacaagccgttctccgcgcctcaaggccgcgccatggcccaaggcttcttcccgttcgtctacatgcttggcagcctgctgctcatgctgcccactggcatcgtggcgctggtcatgctgctgacaggagccgaaggcggcatgtggctggcgattattccggtcgcgctggccaatggcatcggcattctggcactcgggacatggctgggcggtaagctgatggatgcgcgaatgctctcgattgtggcaacactcgactcgttcgcctcattgcagaaatgattgccttggcataaggagcacgatggtatctacagcggtatcacgccgtcagcgacgtgaagcgcaacggcggacccaacgatcgcatcgccgaacactgaccgtcatcatttccgcactgaccaccatcgccctgttcgcggggtactgcgccgccgacatcaccgacgtggcccccggattgttgacgttaaaacctgtcaccgcacctgttttcgccaatccggccaccgccaaatcaggcggcaccatcgccggtgccctgaacgcgaacaaggccattgattccacggccgcttctgcgctggtcaacgaattgctgtccgcgcaaggcgtgggaaacgatacgtcggtgatcattgaagacgcccaaggcaccgtcgctgccgaacatgagtcgaacactccacgcgagcctgcatccacactgaaaacgctgaccgcgctcgccgcctcatccaccctgaacatggcatccaccttggatacccaagtgttcctgacccaatccgatgacggcaccaatacgttgaccctcaaaggcaatggcgacatgctgctgtctgcaggcgattccgacgcaaaccataccaacggacgtgccggtctgaacaccttggccaaggccaccgtggccgcgctcgcccagcgaggcatcacttccgtcaatctcgagtacgacgacaccctattcggcgactcacgcattcccgcaggtctgtcggaaggcggcgcggtcttaagcgactacaccgtctacttcacgccggtctcatcaatggcgattgatggaggccgccaatacaccgccgatacgcctgcgccggccgaccctgatgattcggccggatacccggaactgtcccagcacaccgccagcgacgtggccacgaaattcgccgaactgctccaatcgaacggtgtggccgttaccggagacgtgacggcaaacaccgctccatccggcgaaacgcctttggcctcggtgagttcggcaacactgtccgaaatcatggcatacacgttgcggcattcggacaatacgctggccgaggagttcggtagactcaccgccttggcgaaatcagcgacaaacagtcctgaaggcggcacggaggcggtcaaatccactctgaacgatctcggtctcgacacatccggtctgaccatggccgattgctccggcctgtctcccggctcccggctcatcgtacgcacgctggcggccgtccaacaacgtaatctgaccaccgagagcggtgctgctggtgcggaaggtctatccatcgcggggttggtgggcacggcgcaggatcggtatacggatgatgccgtggccggtctgctgcgcgtcaaaaccggcagcctcggcacggtcacgtcgatggccggcaatgtgtcccgcaccaatgggggagcgttgtcgtttgccgtggtggtcaacaatcctgaggattatgccgccgcgcgtagcgccatcgactcgttcatcaccaagctcgcggggctgtaaaagatccatcaagtgccatcaaaggctacaaaggccgtaaacgtccataaacgcacgagtacacataaccagaaaaagggtggtgagtacatggcatattccgcacgattgcgcaaggccgtaggcgcggtccacgcaacgctgagcgctgtggaactatgcgatgtgcaggctcccgaattcgcgcaacatggggaccatgccgttgccgccgatgcgccgctcgtgctcgtggcctgttcaggcgggcgcgattcgatggcactggccgcggtgagccatatcgtatgcacgtccatgggcgtgcgttgcggtgtcgtgattgtggatcacggcttgcaggagggttccgaacaggtcgccggcgaggccgcggatcgttgccgtgcgttgggactgggcccggtcatcgtgcgcaacacaaccgtgcaggcacgcggtgagggcctcgaagcggccgcacggcaggcccggtacaacgagctgtgcgccgcggcgcgtgaatcaggtgccattgccgtgctgttggcccacactatggacgatcaggcggaaaccgtattgatcggactgctgcgcagccgtggcgtggatgcgttggccggcatgccgcaggtcttcacacgcagtggcgtgacttttgcgcggccgctgctgacccttactcgagccgaaaccaccggcatttgtgaagacttaggtgtggaatattgggatgaccccaccaatggcgatgcggtagacggcgagttgccgaacgactatccgttgcgctcgcgggtgcgtcatgacctgctgccggccatcgagcgattcgctggattcaatgtcgcccgccatttcgctgaaagcgcacggttggccagaatggataaggagtatctggatcagcgatccgacgaggtgatgggggaggcggttacgacagttgattggccggcatcgtcggcagcggtatcgaccgatacgccacgagcctgtgcggcaggcgataccaacgattcgagccatggtgtcggcctgatgatcagcgtcagacgtattgcacgtgagccagaggcgattcggttgcgggtcatcgctcatgcgctgagccaagccggtgtgaacgccagtgccgcccagattgccgccatcgaccggctggtcgtcgattggcatggccaaggcggcgtctcacttcccagaggttattcagccaatcgcaagaaacacgtcattcgcgtgtgccaagatggtgcgcatgcgaatcgctgacgttgaggaagatattgaccacgagctggtcagcaaagaacagatcgatgccaagatccacgagatggccgctctcgcgagcgaggattaccgcgataagaatccgctgctcgttgcggtgctgaaaggggccgtgaatacgctggtcgcattcacccaggccatgagcattcctgtacagatcgacttcatgagcctgtcgagctatggctcgggcacagtgtcgagcggtgaggtcacagtcaggcaggatttatccgccgatgttcgcggacggcacatcttgattgtggaggatattgttgattcaggacacacgctcgcgtggctggtcgcagaactgaaacgtcgtggtgccgcttccgtggaggtctttgctttgctgagcaagccctcccgccgagaggtggacgttgatgtgaagtacgccggctatgagattccggacgagttcgtcgtcggcttcggcctcgactttgacgaacgctaccgcaatctcgattcgatcgcggtcctcaagccgtccgtctaccaaggagtgcaagcatgagcttcccgcaagggccgggtaacggcaataatccgaacccgaacaacaaccgtaacaacggcaacccgttcaccaacccgttcaaccgtggcaataacgggaccaatggcaaaggcaacaacaacgagaaccgcccgatatggcagtccccttggctatggggtgccgtgctcgtggtcatggtcgtgctgatgttccagatgttcgccggcggtggcaccaaaaccatcgacaccaaagatggtttcgcgctgatcaatcagggcaaggccacgtacgccgagattacggacaacaagcaggtcgtccgccttaagctgaagaacgactacaccaagaagaatgccgacaccggcaaggtgaccaactacggcaagaacgtgcagttctactacaccttcgcgcagggcgcccaagtggccaaggccgtggagaacggtgatctcgaaaagggctggacctcgaacatcgagcagaccagcatgctgagctacctcgtcacctcgattctgccgttcgtcatcgtcttagccctgttctggttcctgatgagtcgcatgggcggtgccggcggcatgctcggcatgggcggcaggaagaacagcggcaagctgctcgacggccagacccccaccaccaagttcgccgatgtggccggcgaagacgaggccgtggccgaagtcgaggagatcaaggacttcctcaaggatccgtccaagtacaaggcgctgggcgctcgtattccgcgtggcgtgctgctgtacggtcctcccggcaccggtaagacgttgctggcccgagccatcgcaggcgaggccggcgtgccgttctactcgatggccggctccgacttcgtcgaaatgttcgtgggtctcggtgcctcccgtgtgcgtgacctgttcgatgaggccaagaagaacgcccccgccatcatcttcatcgatgaaatcgatgctgtgggccgcaagcgtggctccggcatgggcggtggccacgacgagcgcgagcagacgctgaaccagctgctcgtcgagatggatggtttcgacaacgacaccaacctcatcatcatcgccgccaccaaccgccctgacgtgcttgaccccgctctgctgcgtccgggtcgattcgaccgtcaggtgggcgtggccgcccctgatctggaaggccgtgaggcaattctgagggtgcatgccaagggcaagccgttcgtaccggacgtcgacctgcacatggtcgccgtgcgcacgccgggcttcaccggtgccgatctggccaacgtgctcaacgaagccgcgttgctgtgcgcccgtgccggtgcccagttgatcgacaaccgcgccatcgacgaggccatcgaccgcgttcaggccggaccgaagcgcaagtccaagggcatggctctggaagagctgcgcaacaccgcataccacgagggtggtcatgcgctggtggccgccgccctgaacaacaccgacccggtgaccaaggtgacgattctgccgcgaggccgcgccctcggctacaccgccgtcatgccgacctccgaccgctactcgcagtcgcgcaaccagctgctcgaccagatggcctacgcgatgggcggtcgcaccgccgaggaaatcgtcttccacgacccgaccaccggtgcctcgaacgatatcgagaaggctacgaacatcgcccgtacgatggtgatcgaatacggcttctccgacaagctcggtgccatcaagtggggttccgacgatgaccagaccactgtgatggacggtctgcagccgcgcaagtactccgatcgcaccgccgaagtgattgatgacgaggtgctcaagctggtggagaccgcgcacaccgaggcgtggaccatcatcaacgacaaccgcgagatccttgacgagctggtccgccagctgttggtcaaggagaccctgaacgagaaggaacttgcggcgatcttcgcgccgatcaagaaggctccggtccgcccggtgtggctgtccaacgaccgtcgccccgactcggacaagccgccggtggagattcccgaaagccttaagcgctcggtcggcatgaagccggaagagtagacacgatgacgattcggcccgacctgttcatgtggtttctcacgtacgcaggccgggccgacgtcgctgtggacaatgacaagggagagatgagatgaacgaatatatagagtcttgccagcgggagaaacgcacatacgacgaggaaggcgtgcgcgaagccgtacgcctgttcctgaagtcgattggcgaggatcccgagcgcgagggactggtggaaacgcctgaccgtatcgcccgcgcgtgccgcgagctgttcgccggtctgcaggcttccccggccgatgtgctggagaagcacttcgacgtggataccgacgagctggtgctggtcaaggacatcgaactgtattcggtgtgcgagcatcatctgctgccgttccacggcgtggcccatgtgggctatattcccgccaaggatggggtgatggggctgagcaagctcgcccgactggtcgaggtgtatgctcgccggccgcaggtgcaggagcgtttgacccagcagatcgccgacgcgctggtcgagtacgcgggcgcacgtggcgtgattgtggtgaccgaatgcgagcacctgtgcatgtcgatgcgcggcatcaagaagtcttccgcccgcacggtgacctctgcggtgcgcggcatgctgcgcaatccggccacccgagccgaagccatgagcctcattttggataaatagtgtctactaagctccctcatcatagggagctcacttgggacctacatagaaggggaaacataatgactgatttgcaggcgttgcatgacactacgcacaccatggtgatgggtgtgctcaacatcaccgaggattcgtcctcggacggcggcctgtggttggacccggccaaggcggcacagcacgggcgcgacatgatggccgccggcgcggacatcatcgacatcggcgccgaatccacgcgccccggcgccaagcgcgtgtccgaggccgacgaactggcccgcatcaccggtgccgtcaagacattgattccggccggtgccatattgtccatcgacaccacgcgcgcatccgtggccgccgctgcgctgagcgagggcgcccagatcatcaacgacgtttccggtggcacgctggacgccgaactgccgcatgtggtcgccgaccacgactgcctgtacatcgtgcagcattggcgcggctggctcgccggttccaagggcgcgaaccccgatcaagacacctccgtctacgagcacggtgtattgaccgacgtacacgacgaactcatgcgccaagtcgacggtgtgctggccgccggcgtgaagcctgagcgcattatcatcgacccgggcctgggcttctccaagcccggcatcgagcacaacctgccgctgctgaccggactcgagaccttccgagccaccggatatccggtgctgatcggccagtcccgcaaacgcttcatttcggcgatgcttaccgaggagggcgctgccggtgctgatgggccgatcatggcccagcgcgatgacgtgaccgcagccttgtccgccctgtccgccgaacacggcgcatgggccgtgcgcgtacacgacgtggccaaaagccgagccgccgtcatcgccggcaacacctggcgcgaatacgcatgattcccctggctccgttttttggttgcttctaggtcttggctcccctcggacgaggggagctggcgccgaaggcgactgaggggagcatttgagcagaaagccttaccaatggacaccatcactcttaccggcgtacatgccaacggcacccacggtgtgctcgcctttgaacacgaacggccacaaaccttcgtcgtggacgtcaccctgcaccttgatctggccgccgccggtcaatccgacgatctcaacgacaccatcgattacggccgtgtggccaaggatatcgcggctgtcatcgaaggccctcatgtggacctgatcgagcgtctggcccaacgtatcgcggataagatccttgccgatgcgccggccgtcgcctccatcgacgtcaccgtgcacaagcctcatgcgcccatcgtcgtggcttttgcagatgtatcggtctccatctcgcgcgtgcgtgccaccgataatggacgcactgctgaagagcatgccatccataacgcggtggtggccttgggcggcaatgtgggcgaggtggaatccaccttgcgagccgccgttcgggagattgacgcgctgctcggcacacaggtgaccggtatttcgccgctttaccgcacggccgcgtggggcatggctgacggtacgccggatttcctgaacgccgtggtggagcttgaaaccacaatgggcagccacgaattgctcgccgcgttgcaaagcatcgaggcgaaccatgggcgaattcgtgagaatcattgggattccaggccgttggacttggacattatcgactttgatggcatcaccagcgcggatccggatctggcattgccccatccgcgtgcttggcagcgcgcgtttgtgctggctccttggttggcgctgaatccgaacgccaaacttgccggagcccatgaggggcctgtagccgatttgctggccgccgcaccggaccgtaacgccgtgcagctcgagagcgaagactggatgctcggcgggcatgcagtcaagcaaaaatcagcgtcggagtcggcacccgtctcacgcaaggcgattatttcgctggattccacctcgcaggatgccgaacggctgttccgcgaaaccatcgtttccatcgacagtgttcctggcaatcaggtacagggcatctcgccgctctaccatgtcagccatttcgacggcccggacgcgatgagcgcggtcatccaaatcgaaaccaagttgccgcccgccgacctgattgccgtattggtcagcatcgaaagcgttcatgatctggcagtcgaccttgaccttgtcgacatggaaggcgtgacttccgacgagcccaactgcagcattccttggccgtcggcccgtaaccatgcgtcggtattggcaccttggctggatatggacccgaatgcttctctgggcggcgacccggtggccttccttttggccatggcaccggatgccggacaggtcggattgctatcggacaactggatactgtcgaacagttgagctgatggcggaaccagttacgaacggtaggctagaaaccagacggtgacggaccagtctccggcctcgaacagccgggcacggcagtgacgaaaaccaaatcaagatgaacagcccaggcgcgagggccgttcgcaaacagcaaacagcaacgcaacgataaggaggccggacatgaaaacacggcgaacaccatggtggcagtatgtgatcggtgccgtgctgggcctgttggcgggtatcggtctggcctcctacggcgaaagctcgggactgtcgctgattggtgcgccttggattgtgaccggattgctggccgtgctgggcgttatcgtgctgatcttggccctgcaagtgcataaatacgcgaataccgaccccaagaagcgtccgcatagcttcatcaatcccactatcgcggtgtatacgctggtgctggcaaaggcactgggattggcgggcgcaacgcttgccggctggtatggcggtcagatcgtgatgagcctgagccatatcgaggcggatttctatgcacacgccgtcaccgagtgcgcaatcgcggccgtggtgtgcatcgccgacatgatcatcggcattatcggcgaatggttgtgccagctaccgccgaacgaaggccccgaaaactcgaaaatcaaggaagccaagcgccgtagcgacatagcccaagcctacaagcggtaggggtgactattcctacggcacgcgcaccatagcttcctgagcgatggccgccaccaagtcgccattctgcgcatacactttggcaatgccgagtccgcgtccgtgcgcggcgataggcgtatcctgcacatacaaatgccattcgttgatatcgatatcctgataccaccacatcgaatggtcgatggacgcataggaaatgcccggtgtggaaatcgacagtccggcgcggcgcagcaccggctccatcatcacctgatcgcagccaagcgccagcatcgcacgatgcatgacctgcggcacatcgacgtggccatcggccttcatccacaccatctgcttgccggaatcatgctcggcggaatccttgtccgcgcgcagcatcacggtcggcgtcacgtggcggatatcgaacggcgatttctcggcatagtaattggcgaacggcgacttctcggcgaacggctgcatgagttctttggcggaagtcaacgtttcgggatcgggcaggttttccggcatcggatcggcaaattccacaccctcttggccggtctcctggaaagaggcgatggccgtgagaatcgacccctcggcttgggtgacgttgacccgacgagcggagaacgagcggccgtcgcgaaggttctcgacgtcaaacagcaggtcttgacgaatatcgccggcggcaatgaaatagccatgtaccgaatgcggcaggcgtgaagggcccacggttttggacgcggcaatcaccgactgggcgatgacctggccaccgtagacgcggccggtggggaagtacatactctcgccattgatgtatgtgtgattgcggtaagcggaaggctcgcccaactccagcaccttcaccagatggtccaatggagttacggtggttgcctgagccatggcgttcctcgattcttgttctgctgtgttcgatattcggttatcgtattccaacctatggttggcagtctatccggtgggggttaagagttccgggagcgaaatgtaacgagactgtttggaaggtaaacggttggttatgcggtgcgttgtcgctacgttgccgctacgttgctgctgcgctgccggtgtgttgccgtaggcgactgtgggattttatgggatgcggtgcggggcagccatggagcaattatgggaaagccgcccctgagggacggctttcgacgtataaagcgcgttgtggcactaatgccagcgtatctcagccgcgcacgagcttcttgtgcaggcggtgcgggcgggccgcatcctcaccgagtcgggccaccttgttctcctggtaggactggaagttgccttcgaaccagtaccacttggccggattgtcgtcatcgccctcccacgcgaggatgtgcgtggcgacacggtcgaggaaccaacggtcgtgggagatcaccacggcgcagcccgggaactcgagcagcgcgttttcgagggattccagggtctcgacgtccagatcgttggtgggctcgtcgagcagcagcaggttgccgccctgcttcagggtcagggccaggttcagacggttgcgttcaccaccggacagcacaccggtcagcttctgctggtcggcgcccttgaagccgaagctggccacataggcgcgggtcggcacctccacaccggccacctcgatgaagtcgaggccgccggacaccgcctcccacaggttcttgttcgggtccaggccttcacggttctggtccacgtagctgattttgacggtgtcgccgatcttcagctcgccgctggtcagcggttccaggcccacgatggtcttgaacagcgtggacttacccacgccgttcgggccgatcacgccgacgatgccgttgcgcggcagcgtgaaggacaggtcgtcgatgagcacgcgatcgccgaaagccttatggatatggttggcttccagcacggtggagcccaggcgcgggccggccggaatctgaatctcggagaagtcgagcttcttgttgttgcgtgcctcgttctccatctggtcgtaacgctccagacgggccttgttcttggcctgacgggccttgggggaggagcgcacccagtcgagctcgttcttcagtcgcttggcgagcttggcgtccttggctccctgaatctcaagacgcttggccttggtctcgaggtacgtggagtagttgcccttgtacgggtacaggtggccgcggtcgacctcgcagatccattcggccacgttgtccatgaagtaacgatcgtgggtgacggcgatgacggcacccttgtactggtgcaggaactgctccagccacaggatggattcggcgtccaggtggttggtgggctcgtcgagcagcagcaggtccggggcctcgagcagcagcttgcacagggccacacggcggcgctcgccaccggagcacacgttgaccggggtgtccggatcggggcactgcagggcgtccatcgcctgctcgagctgggagtcgaggtcccagccgtcggcggcgtcgatctcggtctgcagcttgcccatctcttccatcagcgcgtcgaagtcggcgtccgggttggccatttcctcgccgatagcgttgaatcgggcgaccttctcggcaatcgggccgaacgccatcttgatgttctcgcccacggtcttggtgtcatccagcggcggctcctgctgcaggatgccgaccgtgaagcccggggtcagcgtggcctcgccgttgctcacggtctccaggccggccatgatcttcagcagggtggacttacccatgccgttcgggcccacgacgccgatcttcgcgccgggcaggaagctcagggtcacgtcatcgagaatcacgcggtcgccgtaagacttgcgggccttgatcatctgaaatacgaattcagccatgttgtgcagttactccttaaaaaggggttggaattccgctgtttctttagtctttagtttgtgatggatacgctgtgtgcagcgcggagcacgcccccccgaatcacggatcgcggtgcgccgcgtcaggcctgtgccgccctgtccgcataacgatcgaatccacgccaaaccaccgcccaccatggtatcggaagggctggaatggcgggcgtcgctatggcttggaggggtaatggatgggcctgacattgccgtggcgcgacgcgccgggcggcgcgccgtggtccagtgatgctgtagtatatcctcttgtgcttcattgaggtacagatggccccgtagctcagttggttagagcgccgccctgtcacggcggaggtcaccggttcaagtccggccggggtcgccaccaagctcctgacaaatgtcaggagcttttttgttcttttgccgtatttcgtggtgtagggcgaaatatggggttataggccaaaatgtgtgtctggtgtttagtcgtttgatggccattcgactctggcatggaagctgtttcagtcgatgccgatgccgtatcgcatggaaataccgaaggtttcgtgctggccttggggctctgctcgacacgccgatagtctgaatgacaacgtttgctattgaatgacaacgttagcgttaacagtgcttataaatggtgaaaaacgtgtgcagggtcacattggcagaacgtgcgcgagatatgacaaatcatgaaaaatacgctatgggaggtcatggcaactcgttactattttcgctgtctcgtacgccacacaagccttcaaggagtaagccatgaccacgctcgccattgatatcggaggaactaagatcgccgccgccgtctgcgatgaaaacgatagcatcatccagcgctggcgcgtccccacgccgatggatgccgacgccatcaaccagcacatcgccgaggtgtaccgcgaggctgtggccgccggacacaccgatatcgaggccatcggcatctccgccgccggcaacgtgagcgccgaccgcaagacgctcaccttctccgccaacatcccggcctggatcaactacgacctgtccgagcacgtcggcgcgctgatcgaccatgccgtgccggtcgttgtcgagaacgacgccaactgcgccggctggggcgaatacgtgcacggtgccggccagggcagctccaacatggtcgccctgaccgtgggcaccggcctcggcggcgccatcgtgatcaacggtcagctgtaccgcggctccttcggcatggccgccgaactcggccacctgccgatggtcccggacggcgaccactgcggctgcggcctgcgcggctgcgccgagcgctacacctcgggcacttcgctggagaacttcgccaagtccgccgtgcgccgtcgtccgcaggatgccaagcgtctcatggagctgtgtggcggcgacatctccaagctggaaggcccgatggtctcccaggccgcccaggaaggcgacgtgctcggcctgtacgcattcggcaagatcggcgaatggcttggccgcacgatggccgcagtctccgccgtgctcgatccggacctgtttgtgatcggcggcggtgtggtggccgtcggcgacattctgctggagccggcccgctacaactaccagcgtttcctggaaggcagcgcctaccgcggccatgccaagatcgtcgccgccaccgccggccaagacgccggcctcatcggtgccgccaacctggctctgcgctgacgatgccgctccggcaacggggcgttagtctaatggtgagtcatggccggtgccatggctcactgccgcgctgatagtgcggtcgatgagtttccgctgcctgaccatggaatcgaatttcgggttctcggcgatttcctcatactcgtgttcggtggtcacgccggcgatttcggcgataatctcctcataggacgtttcgacggttcgatgcacgccggtgacgtgcccctgacgtatcacgacaatgcggtcggataccgcgaacacatccggcagatcgtggcagaccatcaccacggaccggccttcggagcgcagtcgcttgatatatgcgagcacttccgccgactgcatcaccgacagtgcggcggtcggttcgtccagcagaataagctgcgggtcattgagcagcgtgcgcgctatggccacggtctggcgctggccgacggataaggatgcgataggggagccgacccgaatcgccgagctcagggtcttcagcacggaacgggcacgcgagttcatcgaatcgtcatcgcgtatgccaatctgattgatctccttgccgaggaacaggttcgaggccacgtccaggttgtcgcagaactcctgcccctggaacaccgatgcgatgcccatgcggtccgcctccctgatcgagggaatggtcacctgttcgccgttgagataaatatggccgaatcccggctgcagaaatcccgcgatgaccttgatcagagtggactttcctgcgccgttatcgcccacgatggcgatgacctcctggcgctggatggacagattcaccgatttcaacgcctcgacgaagccgaacttcacacagatgtcctccagccgcagcagaggaggtgtgctcgaattcctcatggtgtgttccttcttatccctcttctcctggtaccggtcactggctgacgtcattgcgaaccgagaactcgatggcgcataatgcgccgcctagcgcgcaattgtcgtccgggtgggatgacacgagtacatcgatgggtgccacggcatcagggaacagcatgcgctgcaacgcttcattgaacggttggatgaatacgtcgccggtcatggccagcttgccgccgagcacaatgacctccggatccacgctgatgcacagatcagccgccacctgaccgatacgcacggccgcgtcggcgatgatgcgacggcaaccggggtcgccttcgttggcaaaggacaccagatcatccagcgtcatattgccgtgtgtgacgctgagcaactgcaccagcctgttttccgccacgacggtgtcaaggcagccgcggttgccgcacgaacagatggcacccagcgggtcgacctggatatggccgatttcaccggccaggccggtcacgccatgcatgatttcgccgttgatgacgatgcctgcgccaaccccgtcgctggctgagatatatacgaaattgcgtttgcctgccgccacgcccatacgggattcgccgtatgccgcgaaattcgcgtcattatcgacgtatacgggaacgttgaacgccgtgcgcaacggggacgtgatatcgacgccgtcccatccgggcagaatgccgggaatcgctatggtgtggtcgctggtggccaccggtgcggccacggccacgccgatgccgaccagctcgctggcttcggcgtcgatgctgctcagggtctcattgatgagcagcatggcgcgttccagcgttgtgtccgccttgtggcccaacggcaaggggagcgtgtgctcagcgatgattgacttcgagaagtcaacgatagaaagcgtaagatgacgtcgcgcgatccaaagcccgacgccgaggccctgatgccgtgcaagggtcaccagagtggctctgcgaccgttgcgaacggtgcttttggtctccagctggtcttcgtcgacgagctgatggacgagcgtggacacggtcgcagtggacagtcctgtcacctctgcgagttcgacctgtgtcatggcgccgaacttgtggatgctggccagcaagttggcgcggtttgcctcgcgaagcgaggtctgcgaactgaaaagccttgttgccataagaatccagtgtagtcgttaccggcatgaggcacagcgaggcgcagagcgtggatttttcggcgtgtcgccttgtgatgcgcgaaaaaatcgccattgcgttcattggtcgaacgcaaacgacaggaaattcgctttcttgagtttgacaacttaacttaatacggtattctatgagatgaacctgaggttattctcaggttcgggcgaccaaggagggttcgccatcccctcgaagatgaaggagagcaaatgaagttcactaagaagatcgtcgccgtggtggcaggcgttgccatgtgcgcgggcctcgcggcctgtggtggcagccgtagcggccaggcaactggcggtgatgccaagatcgaaaagggtgccactatcggcatttcgatgccgaccaagtccgaagagcgttggaacaaggacggcaacaacctgaaggccaagctggagaaggccggatacaaggtcatcctgtctttcgccgacgataagccggcccagcagaacgctgacatcgagaacatggtcaacaacgacgccaagatcgtcgtggtcgcctccaaggatggcaccgcagtgggccccgccgttgagaaggcccgcgatgcaggcgccaaggtcatcgcctacgatcgactgatcatgaacaccgacgccgtcgactactacgccaccttccagctggagcaggtcggcgtgctcgaggccacgtggctcattgaccagctcaagcttaaggatggcgccaccggcccgttcaatatcgagctgttcaccggttccccggatgacaacaacgccaagtacttcttcaagggcgcttgggatctgctgcagccgtacttcgagaagggcgtgctcgtctccccgtcccagcacggtcagggtggcgtgaccaaggacttcaccgttgaggattggcagaagatctccgtgatgagctggaagaccgagcaggcgcagaaggacatggaatccatccttgactccacctacgcccacggcgagaagctcgacgcggtcctcactccgtacgacggcatcgcccagggtgtgatcaacgccatcgaatccaagcgtcccgacatgaagccgggcaccgactcctggccgtatatcaccggtcaggacgccatggagatcgcagttgccaacatcgccaaggataagcagggcgagaccgtgttcaaggacgtgaacaagctggctgacgccgtgtacgacatggtcgtcgagatcgccgagggcaaggaagtctccggcctgaacggcaagttcaacaacaacaacatcgacgtcccgtccaagctgcttgacccccagaacatcaccaaggacaacctccaggatctggtcacggccaactacatcacccaggatcgcttcgacgagctgactaagtagtcctcatcaggcaatccgtaaacaaacacaatgacatgcggcgcatagccgatatgcgccgcatgtccatgaacacagaactgtgacgaggagtggtgacatgtcatcaaatgacaccatcttgacgatggaaaacatcacgaagacgttcggtccggtcaaagccctcaccgatgtgaatctttccgtcgatcgcggcgagatccacgccatctgcggcgagaacggtgcaggtaaatcgaccctgatgaacgtgctttcgggtgtgtacccatacggtagctattccggcaaaatcacctttgatggcaaggaatgcaaataccatactattaatgattccgaggccgacggcatcgtaatcattcatcaggaactggcgttgagcccgttcctgtccattgcggagaacatcttcatcggcaacgagcaggccaagggtggcgtaatcgactgggacaagacccgtgccgaggcgaagaagctgctcgatcgtgtgggacttcccgaagacccggataccaaggttatggacatcggcgtcggcaagcagcagctcgtcgaaatcgccaaggcattgtccaaggacgtgaagctgctcatcctcgatgagccgaccgctgcactgaacgatgaggattccgcccacctgcttgacctggttcgtcagctacgtgacgagcagggcgtgaccagcatcatcatcactcataaactcaacgaggtcgccgccatcgccgacaatgtcaccatcattcgagacggttcgaccgtcggtgtgatgtacgtgacgccggagacgccgctcgaccaggaagaactcatccgcaagatggtgggtcgtccgctgcacaacctgtacccgaaccacccctccaataccccgggcgaggaatacctgcgtgtcgaggattggaccgtgcatcatccgctcgacgcggagcgcgtgatcgtagaccatgcgaacatcaacgtgcatgccggcgagatcgtcggtctggcgggtctgatgggtgcgggtcgtaccgagatggccatgtccatcttcggccactcttacggttccaacatctccggcaaggtgttcgtcaagggcaaggaagtcaagatgcccaacgtgcagtccgcgattgacgcaggtctcgcctacgccaccgaggatcgtaagggcaacggtctgaacctgctgcagaacatccgagagaacgcgtccctggcctccctgaccaagatcagcaagggcggggttgtggacgacaaccttgagcgcaaggaagttgaacagtaccgcaaggacttcaacatcaagtgccatgacatcgatgtgaatgtctccaccctctccggtggtaaccagcagaaagtgctgctcgccaagtgggttatctcgcagccggacatcctcatcctcgatgagccgacccgaggcatcgacgtcggcgccaagtatgagatctacgaaatcatcgataagcttgccgatgcaggcaaggccgtcatcgtgatttcctccgagctgcccgagctcatcggtatctgtgaccgcatttacacggtgtcctacggtgtcgtcaccgacaatgttgagaagaatggatttacccaggaatacctgatgaagggtatgaccaaggaaagggaggtggcagcctgatgagcgccgcaactgcaacacctgcaaagaaagaagaaaagaccggcctgctggccacggttgccaacaatgcccgtcaatacggtattgtcggcgcactgctggtcatcgtcgtggccttcgaggtcctgaccggaggcgtgctgctgaagccgaactccttcgtgtccctgattcagcagaacgcttacgtgatcatcctggccattggtatggtgatggtcatcatcgccacccacatcgacctttcggttggttccttggtagccttcatcggtggtgtgtgtgcactgctgatggaacgcgccggagtcaactggatgctcgccatcgtcatagctctggtcgtcggcctgatcgtcggcgtctggcagggcttctgggtcgccgtcatcggcatcccgggcttcattaccactctggccggcatgttgatcttccgtggtctcgccaccgtgatcgtcggcgaatccgtgccgattacctccctcgaattccgtggcattgcccgtaactacctgcccaacatccttggctggtggggtccgttcgatggtctgaccattgtgctcggcatcctgtgcatcgtcggctttgcctggagccagctgcgcaagcgcgcccgtgtggccaaggtcggcctggtgcccgagccgatgagcctgaccgtcctcaagattgtgcttgccgcggtcgtcatcgccttcgtcacctacctgctggcttcctccggtaacgctgatcagggtggtaccccgatcatgctggtgatcgtcggtgtgctggtcttcatctacaacttcatcctgaccaagaccgtgttcggtcgccacgtgtacgccgttggtggcaaccgcaaggccgccatcctctccggtatcaacacccgccgcgtggacttcctgctgttcgtccacatgggcttcctgtccgcagtggccgctgtctgcatgctctcccgtctggcttccgcaactgctcaggccggtatggagttcgagatggacgccatcgccgcctgcttcatcggtggcacggccgttaccggtggtattggtaccatcccgggcgctgtgatcggtgcattcgtgatgggtgttatcaaccagggtctgtcgatcatgggtgttgacaccgccgtggtgaagaccatcaagggcctcgtgctcctgctggccgtcgccgtggacatcatgtccaagcgcaagaagagctgaccttcccctttctcctcctcgatgtgggattcgtgccggtgccgctggtgcggatcccacactgttatctgccgtcattcttgtaatcaaaggactttttccgccatgaaactcaccgcgcgctccacctcccgtatgtatgcattgacctgcttggcctgcgttatctggctctggcagtcactggtcgaggccaataacgatggctcgctgttcaattgggccactattgtcttctcgctgtgcttgctagtggtcatcggatggagtggttggaatgccgtcgccgggtggaacgccaaggagactgaggccgccacggcaggtgccaaggatgatgagggcagcactgatcggtagcgtatatacggctgttgttgccggggacatataggtcccggcaaatctgcagcgatatgtgcattgcaagccagggattccctggcttttttatgtcgaaacggaactcgacacgggcgcgcaggccgttgggtttgtctagagcctgcatatagttacttatggtaatgactattggtaactaattggaggttgggccagcgatgtgcgattcccgaaccgataccaagaccggcttgcttccggtgaatgaggtgcggagcctcctggatgtctgctggaaagcgaaggctatcaccgagctgatgccggcactgcccaaaggcctgaaaccgcgctacgtacacgtcattgatgccgtctggcatatcaacgaaacgaatgggcaggaaatcggcaccgcacgggtaagcgatgtcagcgcctttctcggcgtcactacgccgagcgttaccaaactcgttggcgagatggtggagcttggtctggtggtcaagcatatggatgccgccgatcggcgtgcggtgacgctcacgctcaccgagcgtggactagatatccgccgcgtttacgtagaggaataccatgcgcatcttagccagctattgggcgggctgaccgtggaacaatgcgaaaccactgtgcgcacattgaccgaagccctgcggcttatgcaggaagacgcgcagcatcgcaaaagcatgtgaatgaatggaggagagcaacgattatgactgattcagcaacacaactacctcacggcggcaaacaacccttttccggcaagctcgtcatcgcggtcgtctcgcttgcgattctgaccttcctcggcatcctgtcggaaacctcactgaacatcgcctactccacgctgatggaggagttctccatcggcgcttcggtggtgcagtggctcaccaccggctatctgctcttgctgtcagtatcgatttcgagctcgccgttcatggtgcgcaagttcgccaccaaaaccctgttcatcatggccgtcgtgatcttcgccgccggcacactgctgggcgcgctcgcggtcaacttcccgatgctgctcgccgcccgactggtcatgtcgctcggcaccggcatctccttgtcgctcatcaccagcatcattctggaaaagcgccgcttgaacagcgcggctcgatgctcggcatcgtcagtctggtcacctgcgctgcaccggccatcggcccggtattcggcggcgtgctgaagagccacttcccgcccaagttcatcatcatcggcttcgcgggcaccgtaatcatggacgcggtgttcgtgacgctgtccggcaatgtgtgggtggtggccatcgccgcgaacgatggggcagacgccgccggttcgtatatgatcgccttcccacgcagcatgatggtgttcgccggcatggccgtgctcggcgtgatcctcgcctcgctcatgttccgattctccactcgccgcccgccggaaatgagggaagtcaaatagtatgcccgcagcggattggttggctttatgatggaacagatatgccatcacaggagaagcaggagaactatcatgcttgaaccaccggtcactccgatccgcaaggccaacgacggcctcgaactgccagccaccggattcggcacctacaaggtcaacggcctggccggcgtggacgccatcaagtccgccattcatcagggctaccgactcatcgattccgccttcaactatgagaatgaaggcgtggtgggccgcgctatccgcgaatccggtgtgccgcgcgaagacatcatcgtcacgtccaagctgcccggccgccaccacgcccatgacgaggcgctgctcaccattgaggagagcgtgtgccgtatgggcctcgactacatcgatctctatctgatccactggccgaacccgagccaaggccagttcgttgaggcatgggaggcgctggtcgaagcccgtgaacgtgggctggtcaagcatatcggcgtcagcaacttcttgcccggccatattgatctgctcattcgcgatacgggcgtgaccccggccgtcaaccaagttgagctgcacccgtacttccagcagcgcgaacagctggcctacgacaacgcgcacggcatcatcaccgaggcatggagcccgctgggccgcgccaaccagatgctgcgcgacccggacctgaagcgtatcgccgccaagcacggtatttccgtggtccaggccattttgcgctggcacctccagtacggcgacgtggccatcccgaagtccttgaacccggagcgccagcgtcagaacctcgacctgaccgcttttgaactcgatgatcaggacatggccgatatcgccgcaatggacaaccccgaaggccacaccttcggccagaacccccattggcacgaagaagcgtgattccagcatgcaacgtcctattatgacttcgcggtcgtttttgcgcacgccgtccgaagcggccgggcccggcgacgagcaggtgatcgaagacctcgtagacacgctggaggccaaccgttcacggtgcgtgggcatggccgccaacatgattggcgtaggcaaacgcatcatcgtctttgtggatgaagaccttggcgggcgcataacggtgatgctcaaccccgtgattaccgcttcggacggtgccttcgacacccaggaaggatgcctgtccctgaccggcgaacgccgcacactgcgttatcgacgtattgaggtcaactacgaggaccgtcggttccgcgcccgccacgccaccttcgccggctggaccgcgcagatcatccagcacgaagtcgatcactgcaacggcatcatcatctgattcattcggtgctcgttgcagcccaactcccgaggctggtcatcgcgattacgatgcgattacatcgcaaccgctatgaccagcctttttgtgcactggtggggtgggtgttctcatcggtgttggggtgccatgcgctggcaggttggcttcgctgaggggtgtgggtggtgtcatgtcgccagcggttggcaggttggcttcgctggaggttctctcagcgtcggtgatgtgccaaagagtggcgggctggcttcgctaaggagcgttaccgtcggtggagaaccagtgcgtgacctgctgccgacgctaagcgttcattaagcgtcgttagcggccaaaacttggacgtgtaacgatgctgggcggttttagcgtcgttgctgtgccaagtcgtgggcctctgccgacgctgccagtgcagtagcgtcggcgttgggacaggtgttgggcctttgccgactctataagcgggggaaaatcattcgctggtgcctaagtgggtctattgccatgctgaatacatctgctgagtgtagctatgcgttcgaaggcgatttcgggacctttctcagtagcaaatatgcctaatgcgcggagttatacacttcaccgtgcacttatacacgccaaacgaagcagaaatcgactgctgacagtggacgacacgccagagacgatgtggataacccagagacggtggataacagctgcgcgatcagtggataacctgcaagaaagtgcggttatccaccgacggtagccactgttatgcacattccataccccttggaatcattgggttttccacttatccaccatttcgccatgtgggcttgcgggccaccgcatgagcgccatacagtgtgcctcacggcgggcaacgtagcccgccgtccacatcacatgaaggggaaacaccatgagcaccgcaaccactactactgccgaaaatgccggtttgccagcaatgctggacaccaaagacgtagccgaaatgttcaaacgctgcaatctcgccgtctatgccgaagcgagacgcatatactatcgcgaagtgaatctgaacccatgcaaaaagtatccgaagcaggtactgcaaaggatcgaatggtggttctgggattggtttgcctatgactgcgccgtcagcggcgtgggactgaccggcgacgaatccgaggatctacgcatcgaactggaatatggcccaagcgtaggcatttcaccgtttctggctttggctgaattcatgcatgacagtgactcgtggattggcgcacgtgaaatacgtgattttcgcgaacttgacgacaccaatttcgcgtcgatgttctggattcgtgatgccagcgcggtcacggggcgcatcatactcgaagacatgatccacggtggcgcctacgaggtggcggacccgcatgccgccgcgcaatatgacggtgcgcacggtggcatgatcgtcaatcgcattgcgcatgttcgaggagcatggaggtcatgcgccatcccgatttatgaggcacgcaggcccgacgacccagaaatcggtgattcgctggttcgcacatttcagcgcaacggatttaagccggatttcgcggggctcgtgcgattcttctacgggcgagccaaagacaccggtttcgactgggaggatatggaaaaggcgcgtaatgctggcacgttggatgagaccatcaggaaagcctacgatcgatgaatgaatcgcctaacgctgctgtccaagtcggcggccgcgatcacgaatgaagagtgacgcaaccaaacagaccgcgcacacaatggcgaccgtgcggaacgaagcccgcacgccaatggccgatgccgccgcttccggcactccggtgcgcatggccgccgcggtgtgcgtgttcatgatggtgaccagtagtgcgatggccatggctccggaagtctgacgcatcgtgttgttcatcgccgtgccgtgcagaatcttcggtccggtcaactggttcagcgcggcagcggtcaacggcaccgagcagaaggcggaaccggccatcaacaacgtgaggtacaccgtcggctgccatatcggggtatcggcacccatgtggtggacagcaacacagccgcaaacgtcatgatcgcgaagcccagcaaggcgagcgggcggccaccgatacggtcgtacagcttgcctgccaccggattcaagatgaccatggcggtggtgttggcaggggtggtgctgttggagttggcgggggtgatggagccggcctcagcggtggccggcgaggaattgcgtgacgtcaattatcaagtctcgtttccttggctgagttgtctttcttggcttgcccatactatctgtgccttgactgcattcgaaaaccattgcaatgactagcaacacgctgagacgcggcgtattaattcaatcatttgacaaacttagttcgttcgttttattattggtcctgcaatccgtaatatcgcctactgcaaaggagcgcccaaatgggtctgtgggatgttgacaagatcgagtacgtcggccgcgccaaaggaccgaaggaagacttcgccttccattactacgatgccgacaaggtcgttgccggcaagaagatgaaggattggctgcgcttcggcgttgcttggtggcacaccttcaaccaggaactggttgatccgttcggcaccggcaccgcgcaccgcccgtactacaagtacaccgatccgatggaccaggctctggccaaggtcgactacgccttcgagctgttccagaagctgggcgtcgagtacttctgcttccacgatcgtgacatcgcccccgaaggcgacaccctgcgcgagaccaacgccaacctcgacaaggtcgttgacaagatcgacgagaatatgaagtccaccggtgtcaagctgctgtggaacacctcctccctgttcaccaacccgcgcttcgtgtccggcgccgccacttctccgttcgccgacatctacgcctacgccggcggccagctcaagaagagcctggagatcggcaagcgcctgggcgccgagaactacgtgttctggggcggccgcgaaggctacgagaacctgtggaacaccgagatgaagcgcgagaccgaccacatcgccaagttcttccacatgtgcgcagattacgccaaggaaatcggctttgaggcccagttcctgatcgagccgaagccgaaggagccgacgctgcaccagtacgacttcgatgccgccaccgccatcgagttcctgcgcaaccacgacctgactgacgtcttcaagctgaacctggaaggcaaccacgccaacctggccggccacacctaccagcacgagatccgcgtggcccgcgaatccggcttcctcggctccctcgacgccaaccagggcgacaagctcatcggctgggatatggacgagttcccgaccgacctgtacgagaccgtcgccgtcatgtgggaagtcctgcaggccggctccatcggacctcacggtggtctgaacttcgacgccaagccgcgccgtacctccttctacgaggaggacctgttccgctcccacatcgccggcatggacacctacgccgccggcctgctggttgccgacaagatgaaccaggacggcttcatccaggacctcatggccgagcgctacagctcctacgattccggcatcggcaaggacatcgacgagggcaacgtgaccctggccgacctcgaagcctacagcctcgacaagccgcagtccgagctcatcgccgccaccaagtccgatcacctcgagtccgtcaaggccacgatcaacaactacatcattgatgccctggctgaggtcgagtgaccatcggtctgaccgattgaattcgctccatcgggcgtgtacacatcaattatgatgccagtgcgcccgatgggctgattcgatagtttcgccatgtgcggtgttgtgttatgcccgcatggcatctttccattccttctttctcctttctctccttccgctggaaaaccgcctgaggcaacgtcgccaagggcggttttctggttgtggcggggctgggggtggattggggtggggacgaacatgttcgcggaggggtgcgttgacggtgacgtgttggcgacggtgaacatatcggcggcaggagaagataagctgttctcaggggaacatcagcacaacaaaggagttacgcatgcgagatttcattttccacaacccggtgaagatctacttcggcaaagggcaggcgcgccatatcgcacaggaggtggagcgtgtcgagggcgccgttctggtggtgtatggcggcggatcgattaaacgcaacggtgcctatgacgatgtgatggctgcgctggcaggaaccgggcgcaaaatcatcgagctgcccggcgttacgccgaacccgcgattggacaaagcgctggaaggcgtacgactggtcaaggagcatggcgtcggcctgattctggccgttggcggtggctcggtaatcgactgcgcgaaatttatttcgctgggttccggcatcggtgacgatgaggatttgtgggatgactacatcgaaaccggcaaaccggcacctgaagggctgattccggttggcgtggtgctcaccaccgcggcaacgggctcggaaatgggagatgcggccgtgctcaccaattgggaacgtaaccgcaagctcggctatacgtcgttcccgctgatgcccaggttctccgtgctggatccaagctacctgatgacattgcccgccgaacagacggtgtatggcttcgaggacatgttctgccacacgtgtgagcagtatttctcctatccggtggacgacaacctttccgacgaaatcgccgagggaatccaacgtcatattctgcgttcgtggcgagcgtgcttgtccgatccgaaagattatgaggctcgctccaatgcaatgtgggattccacgttggctctgaaccgcattatctcgcgcggcaaggaagaggattgggtgacgcacggcatcgagcacgcgctgtccgcatacaccgatatcgctcacggtgctggtctggctgtggtccacccgcattggatggcatacgtgtatttggtcaacgatgaggtgacggctcgctttgcccgctgggcggtcgacgtgtggggtgtgacgcccaccggcaaaaccgatcgcacggtggccgaggaaggcattgatcgctatgtcgatttcctgcgtcgcgtaggtgcgccgctgactctttctgaggccggcgtgcccgacgatcccgcctctctcgacaagtacgccgatcatgccggtgaggccggcggctcattcgtgcagattcaccgtgacgatgcccgagcgattctcgaggcatgcaaggaaccggtgtcgttctgacggttggactaatcccgtgatttgagccgccgcgtgctgtcccgcaccaccaaagacgtagaaagaaccacgcgcttctgaatcttgcgtccttcattggtatcgatgaccatgcgggctgcagtggcggccatgtcttgcaatggctggcggaccgtggtcaacgccgggcccatgtacgcggcggtctgtatatcgtcgaatccgataacggacagatcttcggggatacggattttcagttgacgggccgcctcgtaaacgcccatggcctgtaggtcattgcctgcaaagatggcggtcgggcgactttgttcgtcttcaagtaacgccatggctccttcgtaaccgcctggcgtggtgaaatcgccttcggtgatgagttcgggagaggtggggatattgcgttcggcgagggccgccgaatagccgtcaagccgggcacgtgagcagagcatttcatccggtccggtgatgatgccgatgcgcttgtggccgagttccagcagatgacgggtggcgatgacgccgcccatccagttgtccgcctgtacggagagatcatctaatgccggattgccggaagggtcgaagacgacgaaaggaatgccgtgtgattggaacatgctgcgttccttgtccgtcaagttggagaacaccagaatagcgccaatgggctggcggtcgatgatgccttcaacccaggaagagtcggggtgctgccggtcgccactttccgcaaccatgacattgatgttgtgcggcttggcctccgtgatgatgcccctgagcacctccagcgcccaaatggtctcaaaatcccgaaataccacctcgatggtgcgttgtttacgggagagggagacgcggcgaatgtagccgttgtctttcagggctttgtcaatggcctgccaggccgcctccgaaatatccgccttgccgttcagggctttggacacggtggccagtgagtagccagtctgtttggcgatgtctgcaagtttgaccttgttctcgccgttgcttttgcgctgttctgccgacgccatcattgaccgccttcatcagagaatgttgatatcagtatattcgaaactttcgtaaagtcaatttgacgataaagaatggtatgtatagataaaaaaggttggaatttcaacgattttgatagtaaaaaagtcgatataaatttcgtttgaccgtcaaactaaggctctctatgatagagatatcgaaaacataaagcgagttttcgataaagttaaagaaggttgatggaataggtgaaacggcgaggtttcactgaaaacatcattaattaccagctgttagatatgtaaccggctgatatacctttcgaaactttcgtaaatcgcggatcggtttcatgctggtcaagaacaataaggagacgataatgaagttcaagtccgtggccgccgcacttctggcggcggtaacctgtgtcagcatggccgcttgcgggagcggcggcgacacgaatgccgatggcaaggtggaaatcaccatgtggcacaactccaccactggcgacggcaaggcatactgggaatccgccgccaaggcgttcgagaaggaaaacccgaacgttaccatcaagattgaagccattcagaacgaggatatggatggcaagctgcagaccgctctgcaggacccgaattccgcccccgatatctttatggcgcgtggtggccagaagctacgtgatgtggtcgaagctgggcaagccatggacctgaccgacaagatctccgacaccgtcaagaaccagatggccactgctgaagccaccggcaccatcgatggcaagatctacagcgtgcagcagtcagtgcttcccggcggcatctggtattccaaggatctgttcgagaaggccggtattactgaaactccgaagacctgggatgagttcaagaccgtggtgcagaagctgaaggacgccggcatcacgccgattgccgtaggcggtaaggacgcctggccggccgcccactggtggtactggttcgcactgcgcgaatgctctgctgacaccttcgacaaggcccagtccgataaggacttcagcgataagtgctggacccgtaccggtgatgatgtgcaggcgctgctcgacctcgatgccttcaacgatggcttcctgaccactccggcccagcagggcgcaagctcctccgccggcctgctcgccaaccacatggcagctatggaactcatgggcggctgggagcccggcgtgatcaaggacctgactccggacaagaaggacatggccgacctcggctacttcgcattcccgaccatggacggtggcgaaggcgatccaactgccatcatgggtggttccgatggcatggccgtgggcgagtgggcgcctgaagaggctgtggacttcctcaacttcgtctccgagaaggaatggcaggagaagtacgctgaggcgttctccaccatcccggccaacaaggaagcccaggatgtggtgaccaacgaggctctgaagcaggtgctgaccgtctacaacgacgcatcctccgtgtccatgtggctcgacaccgtgttcggtcagaacatcggcaacgcactcaacgaaggcgtggtcaacatgatggccggtcaaggttccgcccaagacattgtcaagggtgttgaaaccgctgcggccaagggctgattcgctctgccccgaccgtaattcccgggccgcggcgaatgcttgcacagcaacaaccgcggcccaatttgttttcttaggaaggcctcaacaatgtcagtttcagcaggcgcgaaggtacagcgccgcacgtcgggcttaagcgacaaggttcgcaaacgtatcgaaatcaccatcctttcgcttcctgccctgatcatgttcctcggattcgtcatcctgccggtgttcatggccggctactacggattcttcaagtggaagggctatggcaagcccaccgtcaacggccagttcatcggttttgaaaactacaaggtcattctgaccgacccgaacttccagcaggcattgggacacacgctattcgtggtcgtcgcttcgctcgtcatccaggggccgctggccatcctcttcgccctgctgctcaaccagaaattcaagggccgcgcactgattcgtaccctgattttcgtgccgtacgtcgtttccgaagtcatcgttggcaccggctggagtctcatcctccagaccacaggcgcattgaacgcgctactcaagaaaataggacttggcggggcggactggatctccgatccgaaaatcgccatctggacattgatgttcatcatttcgtggaagtacatcggcttcgccgtcatcctgatgattgccggcatgcagtcgattcccgaagacctctatgaagccgcgaaggtggatggtgctggattctggcgtcagcagtggagcatcaccctgccactgctcggccccaccattcgtatctgggcattcatgtcgattatcggttctcttcagctgttcgacttggtctacatcatctggggccagtacgtgtcgtctaccgcaggaacgtccaccatggcaacctacatggtgcgcgaaggtcgactcgccaacaactatggttacggttccgccgtggccgtggtgatcttcatcatctcgctggtcattgccttgacctaccagcggttcgtacttaaccgagatctcgaaggtgcgctcaccgacgagaaggatgccaagcgtcgtgccaagcgtgcggcgaaggaagcggccaagcttgccaaggccaatggcaatgccgcagcagttgcaaatgaggtggtttcacaatgacgaccgcagtctccccgtccgtgggcaagggcaagaacaagacctatgatccgtatgcattgagaaaatccgcaaagaccccgtggggcaacccggtcgtctacttcttctcactgctgcttgtggcgctgtgcgttggcccggtgctgtacatcattatcggcggcttccgcaccaatgcgcagattacgagggacccggccggctggcccgatccatggaactttgagaattacaagacggtgttcacttcgaacatcttctggccggaactcgtcaactccctgatcgtctccattggcacaatggtgggcatcgtggtgctggccttgatggtgagcttcgtcattgcccgatacgagttcaaattcaacaaactgctgtactcgctgttcgccgccggcatgatgttccccatcaccgtggccatcaccccgttgtatctgctgctgcgcaatctgcacctgatcaactcgcatctgggcattattctgccccagatagcattcggcctgccacaggccatcatcatcctggtgccattcctcaagtccattcctaaggaactggaagaagcggcagagctggacggctgttctcgcatcggcttcttcggccgtatggtgctgccgttgagctggcccggcgtggccaccgtcggcatcctgagcttcgtgagcagctggaacgcctacatgctgccgctgttcctgctcaacgattccagcaagtacaccttgccgctcggcgtgcagatgttcagctcccagcattcggtcgataccgctcaggtactggccttcacctcgctgtcgatgattcccgcgctgatctgcttcaccattttccagaagaagatcgttggcggcctgaccggtgctgtcaagggctagtcgcagcaaccataaccgtgccgtggaaaggtacatggctctttgggccgattcctttcaacctcttcctttcctccttcccacggcacccattcttttcaatgaggagaaaaccatgaagatctccaatcccgtactccccggattcaacgcagatccctcgatgattcgcgtcggcgacacctactacatcgccaattccacatttgactggtggccgggagtccgtttgcacgaatcccgcgacatggttcactggaatctgctgcccgggcccttaaaccgcgtttcccagttggacatgaagggcaacccgtctggcggcggcatctgggcgcctgacctgtcctacgcggacggcaaattctggctcatctacacggatgtgaagatcgtcaacggcgcgttcaaggattgcgcgaactatctggtcactgccgaggacatccgcggcccgtggagcgagccaatccgtgtcaatggcgtgggcttcgacgccagcctgttccatgataccgatggacgcaagtatctggtgcagcaaacctgggacttccgtgaatatcatcatccgttcgacggcatcaccttgactgaattcgatgtcaagaccatgcaattgaagccggaaacagcccgcaccatctggcgcggcaccgatgtgaaattagtcgaagggccgcacctctacaccatcaatggctggtactacctgttttgtgcggaaggcggcacccaatacgagcatcaggagtccgtggcccgttcgcgaaccttggatgagctttcgttcgaaagcatgccgagcaatccgttcatctccaacttcgatacccccggcacctacctgcaaaagcaggggcatggagcactcgtggatacgcccggcggcgaatggtattacgcttcactgtgcggcaggccctggcggcacgagaacgagccggctcatggcgtgcgcggctggtgcacgctcggccgagagacttcgattcagaaggtcgagtgggatggcgatggctggccgtatgtggtcggcggccatgggggagagcgttatgtcgaagccccggccgacgccatcgcaactgaggcccctacggatcatagccagcatgacgagttcgaatcgagcgaactcgacctcaactggaacaccctgcgtgtgccattcaccgagaccatgggccgcgtgggcggcggctcgctgaccttgcgtggtcaagggtcgctggcaaacctgtttgaactgtcgctggtaggacgccgttggcaggcgttcgatttcaacgccgaaaccaaggtgacgttcgagccgagcaactacatgcagatggccggcctgaccaacttctacaaccacctatgctggtcgtgggtgttcgtcacttgggacgagaagcgcaacaaacgtgtaattgaagtggctcagaacgacttcgacacgtacacgtcgttcctcaaagacacagccatcgccattcctgatgacatcgaatccgtatggttgcgaaccaaagtgcgtactcgtacctacacctacgagtattcgttcgatggcaagacatggcatgagattccggtgacgctggacgccgccgtgctctccgatgatcatgtggcccaacgttatggcggattctttaccggcgcgttcgtcgggttggtggccgtggacctttccggatacggcaaagaagccattttcagccatttcgattacatggaaatatgatgacgccaggcggctttcctgataatcagggaaagtcgcctgactattcggcactggggaatgaaaggcgacacttgtggcaagcgacaatgaacattgcggcgaccgtggccgcgaatgtaccataaccgtctccaacccggtgctgcgcggcatgtacccggacccgtcctggatctgggatgcgacgcgcgaggaaatcgtgctggtcaactcctcgtttgaattggtgccggggttgcccattcatacgacccgtgatcttgtgacgtggacgcacacggcgaatgcggtggatgaggcgatgtctcatcgactgctcattgatggcgtcgaggattccggcggcctgtacgcgccgaccattcgccgtatcggcgggcgatatgtgatcgtatgcaccgtggcccgcgtgaatgaggtgaaggcgctcgctgcaggatgctcgcagaaggatgtcgatggctgtcgcgccgcccaaggcaatttcgtcatcgaggccgatgagttgaccggaccatggcgcggtccgtactgggtggccggggccgaaggcattgacccggacatctttgaagacggcgatggcacagtgtggtggacgcaaacgcgcccggcattacacccgcagtgggatggtcaaaccgagatctggacgcagcccatcgccccaggcacgtggacgttgcaagaccataaaaccgtgatttggcgcggctatggcatggatgcggtatgggctgaagggccgcatttgtaccgggtgggcgattacctctacctgatgaccgccgagggcggcaccagcttcgagcacagtgagatgataatgcgcacgcacgcaccgcgcggattcgcggtggcgctcgccggttttgagaagaaccttgccgcgcaagatatctggattgagccggcgcgtgacggtgaacgaggcgtggtgggtcacgataaccggctgtttgaggcttgcaaacgcaatccgatcctcacacaccgtcatttgggagcgggggagccggtccaatgcgttgggcacgccgatctgctgctgcatccgaccgtcggctggctgctcgcgtgtcttggcatacgcgagactccgggcgaggaacccggagaaacgttcagctactgtggccgggaaacgttcgtggcatcggtcgtatggcagcacaatccggtctcgtggaagctggacggtggggagccgaataagcgtatcgatatcgtcgatcccggttggccggtcgtggctccggggcttggccggcttcccgagaagttggtcgtggacgttgacgaggatggattgccatgtgcagtgaggggtgtggattctgcggggtgcgattgcgctgctggtaataatgccgcatgccctgctgagctcatccagctcgacgatacccgcctagtcggcgttcgaggccgtgacgattaccggttcctgcgtgtcgacgggcaggaatatgccgcgttcacccggcccgaatacacgatgatgatgcatcaggattccacccatgctgtcatggtcatggcggaagcggaatccggccaattgacggccgaaatcaccgataggggagataagcggtgcattgcgcttggagcgcttggggccaacgaatggttcggattgcgcttgcatggcaatcgtttggaattccttgccgggcagcctgcacctgacagcattgatgagggaacaatgcctgatattgcactaattgcgcacgcggacgttacttatgctcgtatcatggcagattgtgatgcgcgattcctcagtaccgaatgggccggcggattcgtgggttgcctgatcggcgtaaaacggcggtaatggtctcagcccgctctacaatattgtacaatcatattgtttaatcgttaaacaaatgcaagggggcaatcgatggcgcacgatctcgaacaactcaagcaagatcacccggatgtggcgaaactgttcgccgatgactggttgcagtaccgtaagtcggagattttgccggaacttacgcgcgaggcgcagtccacgtgcgaccgcatcaatcgcatctactttgaagacaccgccgaagctgagcgactgttccgcgaactcgtgcccgaggccggcgagggcgtggacttccgcccgccaatccggcttgattacgggctgggcctgaaaatcggagaccgtacgttcatcaacatggacctgctgattgtgggcggcggcccgatctccatcggctccgattgcctgatcggcccgcgcgtgagcatctatacgccaaaccacgccatcgcccgcaagcctcgactggaaggctggcagcacaacgccgacgtgaccatcggcaacaatgtgtggctgggcggcaatgtggtgatctgccccggcgtcaccatcggagacaactcgattatcggtgcgggtgcagtcgtcacccacgacattcctgccgattccatcgctgtgggcaatccgtgccatgtgattgccgaagtcccggatgactggactcctgaagagcgggccgctgccgagggtcggtaggtttgctgctctggccaactgtcacggcgaaaccgggatacaggagagaaaggaacaatgcaatgacgcaatatcatgtttccgcgcaggcggcgaagacgaacggcgccggcagcgcggccgacccgtttctgaccatcggccaagcggcggccatcgcccgagccggcgatgaggtggttgtgcatgccggcacctatcgggaatctgtcgacccccgattcggcggagagagcgccacgaaccgcatcgtctaccgcgcggccgcgggcgaaccgcgcccggtaatcaccggctccgaacgtatcgacacatggcagcccgaaggcgatggcgtgtggaaagccgtaatcccgaacgcattcttcaacggatacaacccgtacgtggaaaccgtattcggcgattggaccgtatacccggacccaaaggtcgaggtacgccacctgggcgatgtgtatctgaatggcaaatccttctacgaagtcgcctcgctggacaaggtgcgcaacccacagcgttgggataccggccgtgacgccgccaccgattccatcgtgccgctgattgatccggatgccaccgtgaacgtgtggtgctgtgcggtcgatgatgaggccacaaccatttgggccaatttccatgaagccgacccgaatgcggaacttaccgaaatcaacgtgcgcgagacctgtttctacccgagccgcccgttcgtcaattacattacggtctccggctttgaaatggcgcaggcggcctgcccttacacgccgccgactgccgatcaggtcgggctggtgggcccgcattggtcccgcgggtgggttatcgaaaacaatcgcattcatgacgcgaaatgttcggcgatctcgctgggcaaggagatttccaccggcgacaacgaatcgacgcgcacccatcgtaagtccgggtaccaataccaaaaagaggccgtctacaaggcgctgcatgccggctgggagaaaggcgtagtcggcgggcacgtggtgcgcggcaacgtaatctacgactgcggccagaatggtgtggttggtcatatgggctgcgccttctcgctgattgaaggcaaccacatataccgcatcggctccaagcgcgagttcttcggctgggaagtggccgccattaaaatgcacgcagccgtcgacacggtggtgcgcggcaaccgggtgcatgattcggtgctgggtatgtggctcgactggcaggcgcagggcaccgtggtggattcgaacgtgttctaccgcaacacgcgagatgtgatgaccgaggtgacccacgggccgattacgtttatgaacaacgtgtttgcctccgagttcagtttcgacgattatgcgcaaggcgcggcgttcgtcaacaatctgttcgccggtcgcattcgtcacaccgccgtcttggaccgatccacgccataccatttcccgcacgtcaccgatgtggccggcgaggcattcgtctacggtggcgatgatcggtacgtcaacaacctgttcttggctgtggacgattccgccaaaccgttgtgtaccgcggatgccgccggtgcggccggtatggcggaagctggaaccgcgttctttgacggctatccgcgctcgcttgaggagtatgaacagctgattgaagaggctggccttggcgatgaggagttgtatcgcagcgtgaagcagccggtattgctggcttcgaacgcctatgtttcgggcgcgaaggccgcttccggcgaagccgaggccgtggtgagtggtgacggctcttcgttggcattgcgcgaaaccgatgatgagctatggatgaccgtttcgttgcccgaatcgattcggtcggcaactggaccggtgatctccactgctgatcttggccaaccgcgtattgtcgaggagtatttcgagaatcctgacggttcgccgattgttgtggaccgggatatcaccggtgctgcgcgcggcgcatgctcggctcgaggcccattggcggcgtatggcgatggggaagtgctcatctggtcgaagtgacgggatcgcggtttcgactgttgcctctgcctcggcctttgtgtggcactgagtggggctgggctgccagtatttggcaggccggccccttttcgatttgcattggtaacaaatatgatatatggttaaatcattaaactaaatactgtaagtccatgcatacctacgcaacgtcaatggagatactgctatgcgcgcacatcatgttctgctgctgtcgctctgcctgttggccgcagcctacgccgtactgctattcgtttcaccagccgctgcgccgattggcgtcacgctaaccgttgttggtctggtgctggtctcgacgcgctatgcgtggcgcgccaaattcctggctctattcaacgaagcatgatttgatgaatcttcttcctctcttctccttttaagcccggccgctcgccgggctttttcttttgaccgaggtcgaagtggggaagggtgtgctatgggcactttcgtgtcgggggtgccgtgttctcgacaacggcctaccgacttggggtgtatttcgacaatatgattcggcgatgtgcctcagcggatatgtgcggccaatgaaaaagcgggataccgatgtcgatatcccgctttcagcgaataggtaaggccagagcttacttcttcctggctttcttgacgcgcttgggggtgggagccattttcttgggttcgaagaacggccacttgtgcaaagcccaggcgtgcagtgcggggatcttggcaacggcgaagccgatgaccagaccgattaccatggcccaggtctccagatcatggcctgcgaccagcaagccgatgaacactatggcaacgatgaagctcaccatctgcgaggcctttgactgcttggcggtcaccaggtcggccttcatgggaacaagccccagaaacaggccgcaaggtatgcagatgacggccaatatcgcgctgagggttattgacaatgtggttgcatccatgatgttcctttagtgctgtgggttgtggttttctttggcgtctgcggtgtcggtgtctgcggtgtcggcaacgtcgtcgtgttcgttttcttcggcttgttcggcttcggcctcggcgtccgtgctgtcggtttcgtcgtcatcagccgcgtcatccttgccgggctggcgccaccacaggattagcgcgttggccgcgcagtagatggccgcgatgccaatgcataccagaaaaatgatgttcgaggtgctgatcatcgtgccgtcggccattgcttctttggcagattgccatatccaaatcacgcatgcgacggcggtcagggcgtacagcatcatacgggagcggtcgttcatagaagaatctccagacttgttcaaacgacttgattatagccgtatttgtggattgcgaggggaaatgaaaaagccgccatgtgtgcttcggcgaggagcgcggcatggaaagcggctcttcgcgatgctcgccatggcggcattcatcaggaatcgttattcagttgttatctcatggatttgctggcagcgtatcagccgcgggccttggcgtacgcctcgtacacggcttcggtgggctcgccggtctccacgccctcgatggtgagctgccaggtcggcggttcggcctcgccggacagcacccaggcggcctgacgggcggcgccgatggccacgtattcgtcggtggccggacgggtcacgtccatgccgaggattgagggggccagcgtgcggatggccacggacttcgcgccgccaccaatgagcaggatgcggttgatctcggcgcccagcgagcgaatcagctcgaggcagtcgcgctgggaacacagcaggccttcgacgaacgcacgggccagattctccttggtggtgttgtgtagggtcaggccagtcagcgaggcggtggcgtccggacggttcggcgtacgctcgccgtcgaagtacggcaccagggtgatgccgccggcacccggctcggccttgaacgccagttcggccagttcgtcgtagtccacgcctagggcggcgcgaccggcgtccagaatgcgcgaaccgttgattgtgcaggcgagcggcagatagtggccggtgcagtcggcaaagccggaaatggcgccggtcaggtcgtacaccgggttttcagcgatggccgcggccacgccggaagtgccgagcgatacggacacatcgcccacggccatgccgaggcccagcgaggccatggcattgtctccgccgccggggccgatgatgcagccgccttcaacatccttgccggcaatggcggggtcggccttgacggcggcggcctcacgagggcccagcacggtgggcagcacaatggcgtcggcgtgggccttggcggcttcctcgccctcggcgggggccagcaccatggcgatgagatcgcggcggtactcgtcgtgtgcggcatcgtagtaaatggtgccggaagcgtcggagcggtcggtgaacagggcttcgagatgagcgtcctcgccctcggccaccgggccgtagccggcgatgcgccagctcagccaatcgtgcggcaggcagacggcggcgatcttcttggcgttttcgggctcgttctcggccacccacgccaccttggtcagcgtgtaggaggcgacgggggaggagccgacggccttgacccagcgttgcttgccgcgggcggtcacgtcgtccggttcgtcgccctcggccggagctgcaccgagcttgtcgatcagggcggcggcttgcggggcggaactggtgtcattccagagcatcgcatcgcgaatcacgttgccctgcttgtcgagaatgaccatgccatgctgctggccaccgaccgcgagggccgcaacgtcatcgagcccgccggcctgctcggcggccttggtgaaggcctcccaccagaattccgggttgaccgaggtgccatccgggtgcttggcctgtccgaaccgaacctgttcgccggtggcggcgtccgtaatgcggacctttgtcgattgggttgacgtatctacgccggcaaccagtactctcgtcatgcattcctcctcgatgagggtcgcgctcaaaagtttcggcgcgccatagccaataagttagacgattaaactatactgtatctcaacgttcgaatgcaaacggaaacacgcgaaggtgcggtccgattcaatcgtatgacgcacaatgtcatggtgtgatttatgggtgagagcgttcgcaagacgctcaaagcttagggtgcgaggaggtaggggccaatggcaaatctacgcaggatcaatcaggaggatctgcgcaaccataacctgtcggtgacgctcgacaccttattgcgtgcgcagaaaccgatgagtcgtgccgatctggccaaggagacgggcctgaccaaggccacgctctcgctgttggcctcgatgctcattgaaagcggcgtggtgcaggaaggcgagccggtcgtttccaccacatatgggcggcccagcacgccgctggagattcgcggcggatccatcgccggcatcggcctgcagatcaacaccgatggttacggttgcctggcgctcgatctgaacggcgacactctcggccgggagtgggtgagtgaggatatgaccggcactgacccgtacgagatcttcgccaagctcgatgcgatgaccttcccgttggaaagtcgactcaaacgacgcgactgcaaggtggtgggagccgggctcgcgctgccgggcatcgtcaccgacgacatgtggctgttggtggcccgcaatctgggttgggaaaacgtcaacctcacccggttcaacgtggtgcgccggctggatgtggtggccggcaatgaggcgaagatggccgccatcgctcagattccggggtatgccaccgaacgtgcgcccttcctgaatgtggtggaccgcacggactcctttatttacctgtctaccgatatcggcatcggcggcgcggtggtgcgcgacggcgaagtggtgatgggctcgcacggattcgccggcgagatcggccatctgtccgtggcgatggatgggccgttgtgcagctgcgggcgtcacgggtgtcttgaggcgtttgcgggccgtcgcgctttggtcgaggctgccggcattgccgaggatggggatgccaccagcagcgaggccatcgatatgttcctccagcgttggcgagccggggattcggatgtggccaaagtggtcgatcaggccgccgatgcgctggtttccgccatcgcttccgccgtgaatctggtggatgtcgatacggtgctgttgggcggactgtggacgcacttcggcgacgagctggccaccgtgcttgaaggccggctgcgttcggaaattctgggatacccgaatgtgaagattcgcgtgtttgtgccgccggtggcgctgcatccctcgctatatggcgcggccgaaatgggcttgcgacggttcatcgagaacccgttggggtacatgggggagaagtagcgccgggagatgctgcttgttgctggcgggtgcatggtatgggtgcatggcgcgcgtgccggcgttagcgggctcgtgctacactttggcaagttggctgttttgtgcagcgaacgtggggccgtagctcagtcggttagagcatgcgactcataatcgcccggtccagggttcaagcccctgcggccccactcttttgcgtcgtctcctgcggcggcgtagcgcgtcttcacgtccagataggcgcgtacaatcccttaggttccggttcacgtcttgccataggggcatgacgacccgggtcccccgaatccataggagacgtaaaatgcagcagggtatccatcctgattaccaccccgttgaggtgacgtgctcgtgcggcaacaccttcgtgacccgcaccgctggcaaggaagatcacatgttcgttgacgtgtgctctcagtgccacccgttctacaccggcaagcagaagattcttgacaccggtggccgcgttgctcgcttcgagaagcgctacggcaagaagagcaagtagcatacttcacgccagtccgattcgatttggcatgctccggcatacccgatcgaggactggcgttttttgtattctttgacaagttttgttacagcattgacctgcgcaatcgaataatcgaacagaacagcaccatacagaagaaagtgtgttatggcagacgaacagttcccggcggcggcaaccgcgcttgaggagtaccagtccatcgaagaacagatggcaagccccgaagtcgtgtccaacccggacaagctgcgcaagctgggtcgtcgtcacgccgaactgggtgccatcgtgggtgcctacaaagcctggttgcaggtgaaggacgatctggcagccgctcaggagatggccggcgaggacgccgacttcgccgaggaagccaagcgtcttgaagccgaactgcccggtgtcgaggagaagctgcgcaccgcgctgatcccgcgtgacccggatgatgcgcgcgacaccatcatggagatcaaggccggcaccggcggcgaggaagccgcactgttcgccggcgacctgctgcgcatgtacacccgttacgccgagaagcgtggctggagcgtgaacgtgcagtccgagaacaccaccgagctcggcggcgtcaaggacgtgcagatcgccatccgcgccaagggcacgcccgctcccgaagacggcgtgtgggcttcgatgaagtacgagggcggcgtacaccgtgtgcagcgcatccccgtcaccgaatcgcagggccgtatccagacttccgctgccggcgtcatcgtgttccccgaggccgacgaggatgacgacgagatcgagatcgatccgaaagacctgaaaatcgacatcttcatgagctccggccccggcggccagtccgtgaacaccacgtattccgccgtgcgcatgacccacctgccaaccggaatcacggtgaacatgcaggatgagaagtcgcagattcagaaccgtgccgccgcgttgcgcgtactgaagtcccgcctgctggccatgaagcatgagcaggaggccgccgaggccgccgacatgcgtcactcgcaggtacgttcgcttgatcgctccgagcgaatccgcacatacaacttcccggaaaaccgtatcgtcgaccatcgcacgaattacaaggcttacaaccttgacgccgtgctcgacggcgacctgcaggccgtcatcgattccgacatccaagccgacgaggccgaccgtctggccaatcagaaatgactttgccggatggctcccctctgtgaggggagctgtcagcgaagctgactgaggggagcctaatgtccgatcaacggagaccgccagtgcttattaccgacatcatcaaccaagcctcttcgcaattgcgcgaagcgggtattgagacgcctgagcatgatgccaagttgctccttgccgaggcggcaggcgttgaactgcgcgacgtcgacagggctctgcttatgggggaggaacttggcacaaccggacagcttgccgtcttccgtgccatgctcgaccgccgtgccaagcgcgagccgctgcaatacatcaccgggcatgctcctttccgctaccttgacctgaaggtcggtcccggagtgttcattcctcgtccggaaaccgaaaccgtggtgcaggccggccttgactggctgacaaaaaacggcatgatccatccttgtgtggtcgatttgtgcgccggctccggcgcgattgggctgtccgttgtcagcgaggtgcccggcagccaggtgtgggcggtggagctgtcgccgaacaccgccgaatggacgcgaaggaatctgtcggaaaccgcgaaaaagtacccatccattgcctcgaattaccatctggaaatcgcggatgccacgtccttcgccacattggcccaattggacggcaccgtcgatatcgtcatcaccaatcccccctacgtgccgcagaccgatattcccgagcagccggaagtgcgtgattgggatccggaattggctttgtatggcggctcgatggacggtacgttgattcccgagcgcattatcgagcgggcctgccgtcttctcaagcctgggggcgtgcttgtcatggaacatgacgtgacccagggggatcgtctcgtggcctttgccagggccaccggattcgctgccgcatcgaccggccaggactggacgggtcgcgaccgctacctgtttgcagtgtcctaagccccacgaatcccacatttccttgggattgtattctcgtttccgtaattgcgctgtctcataataagaacaatttattgcgggttcaaagccggtctggttataacagtccgcgacaaacatcggatgagagagacgtgaatgacggtcacaagccgtgtgatgtagttctgtggtatgcgaattatgtgagtggaacgtctcacgcgcacatcccgcgcgttggttgacagatgaacgatgttgaaatatcccaaggaagaaggaagaggatgaacgtgaagttctccactaagttcgttgcggccagcgcggccgctgttatggcgttgtccctcgcgggctgctccggcggcagcatggatgattcctccagctccagtgccaaggcctccggcgactccatcaccatcggcaccgtgaccaccaactccggtaccgccgccgcttacggcgaggccgaggtcaagggcttcgagctggcggtctccgagatcaacgccaagggcggcatcaacggcaagaaggtcaagctcgagtccatggacgacaagggcgacgccaccgaagcctccaacgcctacaacaagctcgccggcgacaacaacgtgctcgccgtggccggcccgaccatttccgccaccaccgcagccgtggccccgctggccgaccagtccaagctggtcaccatcgccccggccgccacctccgactccatcgaaaccggcaattacctgttccgcacctgcttcaaggactcctaccagggtgaggtggctgcacgcttcgccgccgagaacctgaaggtcaagaaggtggccgtgctctacggcaccggcgatccgtactcctccggcgtgggagaggccttcgccaaggccgccgaaaagctcggcctcgaagtggtggacaaggaaagctcctcctccgccgacgacaccgagtactccgcccagctgcagaagatccaggcttccggcgccgagctgctctacgctccgtactactactccgtggctggcccgtacatcatcccgcaggcccgctccgtgggtttcgagggctacgtgatgggacccgacggatacgatggcctcaagctcaccggtgacaagtcccagtacaacaagacctactacaccacccactactccgccgacgacaacaccaacaccaaggtgcaggacttcatcaagtcctacaagtccaagaacaacgccgagccgaacacgttcgccgctctgggctacgacaccatctacatgatcaagcaggccatcgagaaggctggcgagaacgccacccgtgaggatgtgcgcaacgccgtggccggcatgaccttcgacggtgtgaccggcaagttcaccatggacaagtccggctcgccgaccaagtccgtgatcgtgctggaaatgaaggatggcaagccggtgtacaacaccaccgtgcagcccaagtgaattccatgaattcccaccgcataatcacgatgtcctagcgtgacttccgcatgaacaggagagcgaccggttttgccggtcctctccctttcgtgttttcacgggctcggatgcataaggacagccgccgatatgcggatatcgccaggcgcgggcgtatcgcgccatcaatcgcaagacatacgaatatctctacgcgcgcagcggtagagaaccacaacattgatagaaagggggagctatgaccgatcagatcatcatgttcatcagccagctgttcaacggtctgaaaatcggcagcgtgtacgcgctggtggcattgggctacaccatggtctacggcatcatccgactgatcaactttgcccacggcgatttcatcatggtcggagcctacgtgctcatgctcaccattccggccatcgtggccatgggactgcccgcctgggtggcggtcattcccgccatcctggtatgcgtggccgtcggcgtgatcgtcgaaaaggccgcctataagccggtgcgtgaaaagggcaactccatgaccgccctgatcaccgccatcgccatgtcgttgctgctggagaacggctcacaggccatcttcggcgccgacttccagaccgtcccgaccatcttccacctgccgtccatcgcgttcggcaagctcaagctgccgggagacaccctgctgaccatcgtcatcggcctggtcatcatggtgggcctgcagctgttcgtcaaattcaccaggcagggcaaggccatgcgcgccgtctccgaagacaaggaggccgccgtgctcatgggtatcaacgtgaactccaccatcgccctgacattcgccatcggctccggtctggccgcggtcgcctcgctgatgtactgcgccgcctacccgcaggtctcgcctatgatgggcgccatgctgggcctgaaggcgttcgtcgccgccgtgctcggcggcattggttccatcccgggcgccatgatcggtggtctggccatcggtctgatcgaaagcctgaccaaggcgtatatcggcaccatcacggcgggcatcatcacctcggcgttctccgacgccatcgtgttcgccgtcctgatcatcgtgctgctcgtcaaaccgtccggcattatgggcaagaacgaaggggagaaggtctgatcagatgaagaagacaatgctttccaccaaacagtcctatcttgtgtgcttcatcggcatcctcgccgcgttcggcatcgtgatggcgctgtgcgaatccggcttggccgactcctacatcaagggcatcatgatgaccgcgtgcatcgccatcatcatgaccacctccctgaacctcaccatcggcgtgctcggccagctgacgctgggatgctgcggtttcgaggccatcggcgcctacgtggccgcactgacctccaaatacatggtcgccgccggcattgccatcgaccccaccgcccgcttcctgctcaccacgctgatcggcggcgtggtggcctgcgtgttcggcatcctgatcggcattcctgccctgcgactgcacggcgactacctggccatcatcacgctgggcttcggtgagatcatccgcgtgatcatccagaacctcaaggtagccggcggcatgggcctcgacaagggcgccgccggacaggcgctgatcggcatcgaacgcaccgccaacctgtacgtcgtgttctggatcatggtggtcaccgtggtcgtgctcttcatgttcggccgctcccgttacggccgtgcggtcaaggccatccgcgacgacgagatcgccgccggcgcctccggactcaacaccacgtacctcaaggtgctcgtcttcgcgatctccgcgttcttcgcgggcatcgccggcggtatcttcgcccagtacatcggctcgctcaaccccaccatggccggttggctcaactccatcaactacgtgatcatggtggtgttcggcggcatgggttcgctcaccggctcgatcgtctccgccatcggcctgaccatcctgcccgagctgctgcgcgccttcgccgactaccgtatgctcgcctactcggtggtgctggtgctcgtcatgatcttccgcccgcagggcatcttcggatcctgggagttctcactgccgcgtctggtcaaccgcatgctgttccgcggcgccgccggcaagggcgcgaaacccgcggccagcgccaagcagcatgaccagtccgacgacaagaccgtgaaggaggcctcacgatgagcgacgcaacccagcccatcctcaaagccgaacatctcggcatcaccttcggtggtctgaaagccgtgtccaacttcaacatgaccatcaacaagggcgaactcattggcctgatcggccccaacggcgccggcaagaccacggtgttcaacctgctgaccggcgtgtacaagcccaccgaaggcgagttctggctggacggaacccggatgaacggcaagaagacctatcaggtcgtgcgtgccggcatcgcccgaaccttccagaacatccgcctgttcaagcagctcaccgtcgaggagaacgtgctcgtcgccttcgatgagtcgttcacctaccacatgggcagcgccatcttccgcaccccgggcttctggaagcaggagaacgagatgcacgagaaggccatcgacctgctgcgcatcttcaacctcgaggggctggccaccacccaggcggccaacctgccgtacggccagcagcgcaagctcgagatcgcacgcgccctggccaccggcatgaaactgctgctgctcgacgagccggccgccggcatgaaccccaccgaaaccgaggatctgctgcactgtatcaacacgatccgcgaccgtttcggtatcgccatcctgctcatcgaacatgacatgagcctggtgatgagcgtatgccagcgcatccaggtgctggactatggccgcaccatcgcatccggcacgccggaggagatcgccaacaacccgcaggtcatctccgcctacttgggcagcgacaacaacgatgacgcggacggcgattccaccaccaaggcggaaccggagccaagcattgccaagacactgacggaaggagcgcgctgatgctggaaatcaaggatctatgcgtttcctatggcgcgatcgacgcggtcaagggcattagcctcaaggtgaacgacggcgagatcgtctccctgatcggagccaacggcgccggcaagaccaccaccctgcacaccatcaccggtctggtgccggccaaatccggcagcattacctatgatggccacgatctgctcaaaacgcatgcgaacaagatcgtcacgctgggcatggcccatgtgccggaaggccgccacgtgttcacccgcatgagcgtgcaggagaacctggagatgggcgcgttcagtctcaaagaccagtccagtctgggtaaggatcttgagatggtgttcgactacttcccgcgtttgaaggaacgtcgccgccagctgtccggcacgctttccggcggtgagcagcagatggtggccatgggccgcgccctgatgagccatccgaagaccatcctcatggatgagccgtcgatgggtctgtccccgctgctggtcaaggagatcttcgacatcatcgtcacgctgcgcaagcgtggcatcaccgtgctgctcgtggagcagaacgcgaagatggccctgtccatcgcggatcgcgcctacgtgctcgagaccggcaagatcaccatggagggcaaggcctccgacctgctgcacgacgagaaggtgcgcaaggcgtacctcggcgcgtgacgtctcacattactatgctcccgctggcgggagctacctcacgaagtgaggctgagggtggttatcggagatttccggcaaccaccctcagtcagctccgctgacagctcgccagcgggagcattcatatatcactgcgcgtaatactgtagcgcggaagcatccttatccgtaatctcgcgaatcggacgggccggattacccacggccacggtgtgcggcggaatatcgcgcgtcaccaccgagccggcaccgatcacgcaaccctcgccgatcgtcacgccgccgattaccgtcacattgccgccaaaccagcagttcgagccgatgacaatcggcttgccatactcgcagtcgtatgcggaaccatcaggtgcctgcctcacgttacgatcctgccaacgcaacggatgcatcggtggcagcagcgaaacgttcgggccgaacagcacgtcgtcgccaatcgtcaccgggcaacaatccagcacagtgaagttgaagttggcgaacacgcgctctccgatggtgatgttgcagccatagtcgaagaaaatcggccccatcacgtcaaggccggcaccgtggccgggcagcagctcatcgagaatcgcggcacgggcggcatgatcggtacgcgacgcggcgttgaagcgcgcgcacaggtcgccggccttctcgcgcagggcattcaattcagggtctaccgaattgtacagtttgccggcgagcatctcctcgcgctcgctggcgcgcggcatacgcagttcgacgggaggcatggtggtggattcagcattgatttcgctcattgaacactcctgtaatttcgcgaaagagcatggatggactcattgtatctacggtctgtgcgtgtggggcgaatcggaaaacggcagtacggcaaacgagcgatgatgaactatgcaagtcggggcgcaatggtgcaatggtagattgtgaatacacaagcgaacggaggtggcgtgagcgtggaaggcggaacaacgctgaaagtcacggatgaatcgctggcacaggcggcgcgtgtcatccgggatggtggattggtcgtcattccaacggatacggtatatggagtggcgtgcgatccgcgtaataaggccgctatcgaccgtatctaccggctcaagcgtcgcccgcgctataaggcgttgcaggtactgctcgcatccaccgaccagcttgatgagctcggtctcgacctgccgtccccgctgaatcgtttgtcggcggcgtttctgcctggcgcgttctcgccgattgccgtagcccggcccgactgcacgttggagactttggccgacaccgccgatggtcgccccggcacgcaaggcatccgcatccccaattcggcgctgtgcctcgcgattctcaaggcgactggcccgctggccgcgtccagcgccaaccgttccggcgacgaaagcgcgcagaccgtccaggaggcggttgacgcgttcggcagcgaagtcgacctgtatctggacggcggtcccacccaaggccatgtctccagcaccgtcgtcaaagccgatccgtacgcgcgcgacggcatcgagatcctgcgtgaaggcgtcatcgcccaaaacgtgattcgcaaggccctccacctcaacggcggtggactcggcgcatgagaatctacctactgattgccgccatcgccggtggcgtcacctggctggtgactccgctgattcgccacgtcgccatcgaaatcggtgcggttggcgaggtgcgtgcccgagacgtgcacaccattcccacgccgcgcatgggtggccttggcatgctgatcggttttgccgtggctaccgtattcgccagtcggctgccttttctctcgggattgttcaacggcaattaccagatgtgggtgattcttgccggcggcatcatgatcagtctgctgggcatggccgatgacctgtgggatctcgattggatgctgaaacttgccggtcagctgctgatttccgtattcgtggcttggggcggattgcagatcatctcactgcctttgggcggttcgctgattaccgcctcgccgagtctgtccatggcgatcaccgcattcctgattgtcgcctcgattaacgcggtcaatttcgttgatggcctcgatggcctggcggccggtatcgtggcgattggtggcatagcgttcgccgcctattcgtatatcatcgcccggtcttccccgagttatgcttcgtcggccacgctgatcgacgtgatgatggtgggtatctgcgtgggcttcctgctgcataattggcatcccgccaaactgtttatgggtgattccggttcgatgctgcttggctatctcatcacctgcgcttcgattgtgatgaccggacgtcttgacccggcctcgattcatgccagcatctatctgccggtgttcatgccaattctgctgccgattctggtgttgttcctgcctgtgctcgacatgtgtctggcgattgtgcggcgtttggccaaaggccagtcgcccatgcatccggaccgtatgcacctgcaccatcgcatgctgaagatcgggcattcggtgcgtggcgccgtgctgatcctgtggggatgggccgcgctgatcgcattcggttcgctgacgattctgttcttcaaagcgcagcatgtggccgtgggcatgcccatcgccgtggtggtgctgaccatagccacgatgtacccctatctgcggcatcgtattcccgagatccaagccgagaacctgacgctcgaatccgcacgcaagaacgcgcagcatgctacggttaagtcgcagtctgcagtaggggagagccgggattcgattggctctcaggcagcggattcgatgactgattcgcctgcggattcgcgggactcgcaggcgggtgaggtgcaggacccggcagcggataagtgagcgctcacaagcgtgtgtcgtgaaggtcagcgcgtgttcatatagtgtttgtatggctacaaacctcgatgaattgaacgcccaatcggcgtatgctccccttcctccgattttcgccaagctcggccttgcttatgatgatgtgttgctgctgccgaacgagacggatgtcattccctccgaagtggacaccagcactcatctgactcgcaagatcgtgatgaaggccccggtcctctccgctgccatggataccgtgaccgagtccgagatggccatcgccatggctcgtaacggtggtatcggtgtgctgcaccgcaatctgtccatcgacgaccaggccgctcaggtcgatgtggtcaagcgttccgagtccggtatgatcaccgacccgctgaccgtcaaccccgaggtcactctggccgacctcgacaagctgtgcggcaagttccacatctccggtctgccggttgtggacaaggaaaacaagctcgtcggcatcatcaccaaccgtgatatgcgcttcatcgcctccgaggattacgacaccctgaaggttaaggatgtcatgaccaaggagaacctggtcactggcccgtccaacatttccaaggacgacgctcaccgtctgctcgcccagcacaaggttgagaagctgccgctcgttgacgaggaaggccacctgaccggcctgatcaccgtcaaggacttcgtcaagaccgagcagtacccggacgccaccaaggatgagcagggtcgtctgcgcgtggccgccggcgtcggcttcctcggcgacgcctggcagcgtgcctccgctctgatggaggctggcgtggacgtgctcgtggtcgacaccgccaacggtgaggcccgtctggcactcgacatgatttcccgcctgaagcacgactccgccttcgacggcgtgcagatcatcggcggcaacgtcggcacccgctccggtgctcaggccatgattgaggctggcgcggacgccgtcaaggtcggtattggccccggctctatctgcaccacccgtatcgttgccggtgtcggtgtcccgcagctcaccgccgtgtacgaggctgcccaggcctgccgtgccgctggcgtgccctgcatcgccgacggtggcatccactactccggtgacatcgccaaggccctcgtggctggcgcttcctccgtgatgctcggcggcacgctcgctggctgtgaggaagccccgggcgagaaggtgctcctgcacggcaagcagtacaagctgtaccgtggcatgggctccctcggtgccatggccccgcgcggcaagaagtcctactccaaggaccgctacttccaggccgacgtgacctccagcgacaaggtcgtgccggaaggcgtggaaggcgaagtgccgtaccgcggaccgctgaacgccgtgctctaccagatgctcggtggcctgcaccagtccatgttctacatcggcgcccacaacatcgccgagatgccggagcgtggcaagttcatccgcatcaccgacgccggtctgcgcgaatcgcacccgcacgatatcgtgatgaccaccgaagccccgaactactccggcttccacaacaactgatcggttgatgcccgctagcttgcgctagttaggggttgattccttgtgaaaagggtctgcttatgcaggcccttttcgcgtatgtggctcgagatagcttgtatgcgctggggtatagtctgaactgttcttgtaataacgggtgacatgacgaaaagaggcttaccatggtcgacagccatgatgcagaaacttacagcgcaaaggattcgcgcctgatttggattgactgcgaaatgacgggcttggatatcttcggcggcgacgaactcgtcgaagtgtccgtagtgcccactgactttgacctgaatgtgctggacgagggcgtggattacgtcatcaagccgtccgagaaggccgtgaaccatatgaacgatttcgtgcgccagatgcacacccgttccggcctgatcaacgagtgggagaatggcctgagcctggccgaggccgagcagaaggtcaccgaatacgtgctgcgcttcacgccggaaggcgtgcgcccgctgctggccggcaacaccatcggctccgataagaagttcctcgaccattacatgccgaacctcatgagccacctgcattaccgcagcgtggatgtgagcacattcaaggagctcgcccgccgctggtacccggccgtgtacgagaaccgcccgccaaagaacggtggccatcgtgctctcgcagacatcatcgagtccttggacgagctgcgctactaccgtaaggcgtttatggctcccgcccccggcccggacgatgctgcatccaaggccatcgccgccgacatcgtagccaccagcatcctcaataagtagtccgccgtacttggctcccctccctgaggggagtctagagaggttgatatgcgccaaaccgaagccctggccattctgaacgccggcgcgaacgtgttcctgaccggtgcgcccggtgccggtaagacttatgtcttgaacgagttcatccgtcaggctcgggccgacggcgccagtgtggcagtcaccgcgtccacaggcatcgcctccacacatatcaacggccaaaccatccattcgtggagcggcgtcggcgtggccaccgccctgagcgccagcctgctcaaactcatcaaatcccgacgcaaacgcaagattcagaccacggacatcctcgtcatcgacgaggtttccatgctgcacgcctggctgttcgacatggtcgaccaagtctgccgcgaagtacgccgtgatccacgcccgttcggtggcatccaggttgtcttgtccggcgacttcttccaactgccgccggtttcggtgtccgggcgcaaccgcgacctcatcgcccccacgcccgaattcatcgccagtcgcgaacggtatgcccgtgccggcttgaaccccgaaggcttcatcaccgaatcgctggtatggcccgaactcaacccggtgatctgctatctgaccgaacagcaccgtcaggataccggcgaactgctgaccgtgctcaccgacattcgcgaaggcgacgtgacccagtccgaccgtgacgtgctcgtcactcgtctgggcaaactgcccgagcccggccaggtcgccgtccacctgttcccggtgaaccggcaggccgacaatctcaacgacatgcgcctgaaccagatcatgcttgagccgcacgagttccacgccgagacagcaggccctgccaacctggtcgaccgactcaaaaagaacatgttggcccccgagcgattgatactcaaggaaggcgcggctgtcatggccctgcgcaacgacaccgatcgccagtacgtcaacggctcgctcggcaccgtgcgtggcttcgcacaggagaacaagggcggctggccgatcgtggaattcgagaacggcaacatcgtcaccatgaaacaggccacatgggagatgatggacggcgacaccgtgctcgcctccgtctcccaggtgccgttgcgctgcgcgtggggcatcaccatccacaagtcgcaaggcatgacgcttgaccgtgcggtcatggacctgaagcgcactttcgcgccaggcatgggatatgtggcgctgtcccgagtcgaatcgttgggcggcctctatttggccggcgtcaacgaacgcatgttcctcgtctcgcccgatgccgtggtgctcgacggcgacctgcgcgaagcctcggccgcggcctccgaccagttggccgatgaaggtgcaagcgcgttcaaacctgttgagccggacgaattcggtgccaattccgatgatgacttcgcccaagacgcgttattctgatctttagaagcgctccgtagcggctaccatggaataagaggtggtagttatggtgctatctgagatatttcgtggaaacaatgaggttcgcgaggccgcccgagccggtgtgcaaatcgatacggtcagtgtggctagtgcgtcagatgcagcaagcgcggcagacggcagcggcaaaatcactggcgcaatacgtccgtcagcggtggccggttcgttttatccggctgaccgcaccgcgctcaaacagctaatcaaccagcagctcgattacggccgaaagcttctgcaacagttggagcccacacttccagcgggggtgccgagggcggtaatagtgccgcacgccggatacatatattccggcacggcagctgcgctcgcttacgcgctcttggagcgtgggcgggggagcgtgactcgcgcggtaatcgtagggccgactcaccgcgtggccgtgcgaggcgtcgcctgttccacggcagcggcgtttgaaacgccgctgggcactgtgccggtagacattgcagccgagcgtaaggctctgggcctgtctgtcaatgagccattgcgctccggtacacatgcccgtccgggcgcgccggctcccgcaatgatcgtcaatggcccaacccacgcacaagaacatgcggtagaagtgcagattccgttcctgcagaccgtgctcggcccagacctcactatcgtgccgttgaacgcgggcgatgccacgccacaagaggtgggtgatgtgttgcgtgctttgtggggtggcccggaaaccgtcatcgtgattagttcggatctctctcactatcatccgcacgaagtcgcccgcgcgttggatgaccagaccattgcggacattgcggctttgcatctgccgattcaccctcgccgggcctgtggcgcatacccgatcaacggccttctggatgtgttaaaaggccgcaagggcatgaggctcttcgagctcggctgttccacttccggcgacgacggcgtggtggcgctcgccggccaacctcgccccgcaatgcgagacgccgacgagccggtagtgggatatgtctcgtttgccgcgtgggaatccaagccggaagcagatgctctagccggtgcagatgacttaggcacatcgggtacgccatcccacggtgaggtgctgctgaaacttgcccgtgccgctatccgggaacggctgcatatcgagcatccgaccgccgctgattcgaccgcgtccattcttgccgcaaacccgtggctgaacgagtccggtgcctgtttcgtcaccctgaccgagggtggccggctacgcgggtgcattggttcgctggtcgcccaccgctcgctcggcaaggacgtggccgagcacgcagtggatgccgccacccgcgacccacgtttcaacccggtcaccgccgcggaatacccgttgctcaacgtggaggtatccgtcttgggcgagcccgagccgattaccgtgaactcctgtgacgccgattcgcgcggtaccggctcgaagaccgcgactctggcattgctgcaatccggacctcagaccgacgccgtcaaacgggacggcagcaacgtcgaacgcccggtacgttcgcgcactgaacttgaggaagtattacgccccggcaaagacggtctgattctcgccgaccgtcgtggccgcagcgccacattcctgccacaagtgtgggatgagctgcccgatccgcacgatttcgtcgctcacctgctcgccaaagccggtatccgcccttcctacgactggaccgatagcgaaatcgactgtcaacgctacgaggtgaccgcctatgccgagcattaacgcagcaaccatatctcctcccgctggcaagaggtggcgcgaagcgccggagggtggtcatcgggaatcgtgcggtcatacggcgtcagtcacagatgttcgtaaccccgccatagcccgctggcaaacgcaattccacgacggtaccaaccgcgctcgctgcgaactatgcccgcgccgctgcgtcctcaagcccggccaacgcggcttttgcttcgtccgctcaaaccacgacggactcatcgtctccgacacctacggccgcagctccggcttcgccgtggacccagtggaaaagaagccgctcaaccacttccaccccggttccagtgtgctgagtttcggcacggctggctgcaattccggttgccgattctgccaaaactgggatattgccaaagcccgcagcttcgaccggctcggcatggaagccagtccggagaaaatcgcgcaggtcgcggccgaccggggcatcgattcggtggcgttcacctataacgatccgatcgtgttcgccgaatatgccatcgacacggccgaagcctgccgagcgctcggcatccatcccatcgccgtgactgccggatacatgagcgccgaagcccggcccgacttctacgcggccatggacgccgccaacatcgacctcaaaggcttcaccgaagagttctattggaaagtgaccggcactcatctggccgatgtgctcgagaccatcgactatgcggtcaacgaggcacgcacaccagaaggcgaacacgtgtgggtggagctcaccacgctactcatccctggattcaacgatgacgacgcccagctgcatgctgaatgtacatggatacgcgagcacttgggtccggacgtgccgctgcacttctccgcattccaccccagttaccgcatgatggacgtaccgcccaccccgcacgagactctgacccgcgcccgagacatcgccctcgaagagggactcaattatgtgtacacaggcaacgtgcatgatcgtgaaggcgataccacgtattgcccaaaccctgaatgccgggccaagctcgtggaacgcgattggtatcgaatcattgccaatcgtttatctgccggatacggtggcaatgggcactgccccgtatgcaggactgctatcgccggacgttggtaatctgcctcaggtcgcccgcgcgattcaccgcagatcgccaatacgcgcggcaatcgtcctcatcgatttgaggctcgcctcatagcgcgcggctgccacaatcagaatgatgccgcccaaagcaagccacaatgccggccagctacgcagcatcgggcgtacttgcggcaaacgcacacccacaatcagcgcggccgctccggacaggccggcgataagatccaccggggcatacggttgcgggttggtccatgcaagaccgaggagtattacgccggcaagaatggtggcgcatgtctcaataacctgtgatgcggtcagccgtcccgacgaacgcccgaatcgctcttgcgcgactgatggttggttcggctgggccattgccggattcgggtaggggcagggagaagcataggcccggcccggctgttacggttgatacgggcaggccgcttgttccgggaccgacataggcgattgcgcaaacggtggcatggccattggctgttgcgatgccgcttgttgtggaactgccgttgggaattgcggggctgcagcagaaaattgcggggcccatgctggggccggttgatacaccggctgctccgaggattccggctgattcccctgttgctcggtcggttgcgtcatcgtgcccttctacccttctagccgtcattgttgcacgagtgagtccgaatgccaagatgaaggtcggaatagtgcgaatagcaggcgggcttgtcggttcacgcgaatatcgtggaacacatgacttccaatacccttcgtatgtcaaccatgttcctgcgcaccctgcgcgaggaccccgctgatgccgatgtcgattcagccaagctgctgcagcgcgccggctatatccgcaaggccgcacccggtatctggacctggctgccgctcggtctgcgcgtgctgaacaagatcgaggccatcatccgcgaggagatcaacggcatcggcgcccaggaagtgcacttcccggccctgctgccgcgcgaaccctacgaggccacccatcgctgggaggagtacggcgataacatcttccgtttgaaggatcgccacgaggccgattacctgctggcccccacccacgaggagatgttcacccttctggtcaaggacatgtactcctcttacaaggacctgcccgtcaccctgtaccagatccagaccaagtaccgcgacgagttccgtccgcgcgccggcctgatccgtggtcgtgaattcgtcatgaaggacgcctactccttcaccatcgatgaagaaggcatgcgcaaggcctactatgacgagcgcggcgcttacgagcgtatcttccagcgtcttgacctgaagtacgtacctgtgttcgccatgtccggcccgatgggcggctccgcatccgaggagttcctggctccgatgccgatcggcgaagataccttcgcgctggcaccttccggcaaggcatggaatgttgaggccctgagcactccggagctgccggaaatcgatgcttccaccactcccgccgcttccaaggaagccaccccggatgccaagaccatcgacaacatgatcgagcgtgccaacgccgaccacccgcgtactgatggccgtgaatggcaggcttccgacatcctcaagaacgtggtgatcaccgtcaagcaccctgaggatgaagagcatgacgagccgtggcgtgaagtgattgtcgtcggcgtgcccggcgaccgtacggtggatatgaagcgactggaagcccagttcgcgcccgccgaacttgaggaagccactgaggaagacctgaagcagcaccctgaactggtgcccggctacatcggaccgatggtgcttggcccgcaggccgaggctgctggcgtgaagaacccggttcgctacctgatcgacgcgcacgtggtcaagggttccgcttggttcactggtgccgatgagaacgaggtcgactactacaacctggtgtacggccgtgacttcaaggccgacggcgtggtggaagccgttgaggttcgccacggcgacatgagcccggacggttccggtccgttgagcttcgagcgtggtgtggaaatcggtcaggtgttccagctgggtctcaagtactccaaggcactggacctgaaggtgctcgaccagaacggcaaggccgtgccggtgtggatgggctgctatggcatcggtgtttcccgcgtgctggcctgcatcgccgaaacacaccacgacgaagccggcttggcttggccgtccgtgattgccccggctgccgtgcacgtggtggccaccggcaaggacgccgtggcgtttgaaggtgccgagaagctggtcgccgagcttgaggccaagggccttgaggttatttacgatgaccgcaagaaggtgtctccgggcgtcaagttcaaggatgccgagctgatcggcgtgccgctggtcgccgtggtcggccgcgattacgtcaacgacggcaccatcgaactgcgcgaccgcaacggcgaaaacaaggtcgccgtgcccgccgccgaagccgccgacgcgcttgccgagcgcttcgccgccctcaactgaggcccacttactcagcctcggcgttaatcgcatcaagcgccattctgcccagtcgcagaatggcgctttgctgtggataaccgaaacttatccacattcttaaaaattcaactgcgtcacagtatccacatttgccagttgcccttgtgcacttcaaacgtcatgcctcacagtggaggtaccgctggggcgtgcaagccggcaatgaagccggagacaggctccggcggtccacatccaaacaacaggccagcaggccgaggaaaggaccgatcatggcaaatcaacaagcagcagtgaccgtcaccggctttgtggccggtgatccgacactaggcggaaccgagagcttccgcgtgctgacattccgtatgggcagcactcgcagtcgactcaacccgactaccagacaatgggaggattacggaaccgcatgggtgggcgtcaaagcgttccgtgctttggccgtgaacgccgccagttcggttcgccgcggtgaccgcatcattgtggtcggctcactcattaccgagcagtggaccaatgagcaaggcgaaccgcgcagtagaaccgttctcgaagccaccaacattgggcatgacctgaccttcggcaccacgtcgctgatcaagccacagcgtgccggtaatggtaacggaggcaatggtgccggcggtaacggcaatgccaacggtgccgccgaaggtatggatggcggaaacgggcaacgaacagcatcgccgtacgttaggccaacgcaatatggcgagggcggtgccgcatccggtgtgggtattgacccgtatgcgacctcgtcggaatctggccccgtcgaatttggggtcacctccgattccggccaatcgccgtcgccatcaaccgagtccgcggccgtggccgatgccgtcatgtcgcaaccggacgccggcgccaatcaaccacagcccgtggcccaacaaacccacgtcgacggtttcgccgaatcttccaatcccagtgattccgaattctgagtgccaaccatacatcatgaaaaaccgctgtgttcgcctgtaatcgaggcaagcacagcggttttcctttacataacggggattaccaaatacgcacacggtccttgggcgcgagccacatggcgtcgccttcggtcacgccaaaggcatcgtagaagaggtccacgttgctggcgatgccgttggtgcggaattcggccggagaatgcgggtcgatctgcaggtactgttcggccagctcgtcgcggttcttggtgcgccagatggaggcgtagctcaggaagaagcgctgcaggccggtgaatccgtccatttcgggggcggtatcgagcagtgccttgatggcggcgggggagccgtcttcttcggcgtcggacttacctgccgccttgccgagcgcgaatgcatacgccttgagcgcgatgttcacgccgcccaaatcgccgatattctcgccgatggtcagcgcgccgttcacgtgcggcgccttatcgggatcgtcagcgtacttctcggccagctgcagcggcacaaagctgttgtactgggcgatcaatgcgccggtacgggcctcgaagttcttgcgatcctcgtcggtccaccagttgttgagcttgccgtcgccgtcatactgcgaaccctgatcgtcgaagccatggccgatctcgtggccgatcactgcgccgatgccgccataattcgccgcatcctcggccttcgggtcgaagaacgggggctgcagaatcgcggccgggaacacgatgacgttcatgctcggctcgtagtaggcgttcaccgtctgcggattcatcagccattcgtccttgtcgaccgacttgccgaccttggccagctgatagccggtctcgtacaggttcgcggccttggcgttctcggcgggcagcgcatccgcggaaacactcagcgccgaataatcgcgccagtggttggtgtagccgatcttcggcgtgaacttggagatcttctccagagccttggccttggtgtcctcgcccagccaatcggaattggtgatggacacgcggtaggcgtcaatcagattggcgaccagctcttccatgcggcgcttcgagctttcggggaagtgcaggcgcacgtattcgcggcccacatcttcaccacaaatgccgttgaccaggctcaccgcgcgcttccaacgatcgcgctgcttcttggcaccggagagcaccttgccgtagaagtcaaagttggtggtatcgaagtcgcgagacagggaggaggcgaagcccagaatcatgtgaacacgggcccacagcttaaggtcggccagatcggcctcggcccagaacgcatcaagaccagtgaggaagctcggctcgtgcacaatgacgcgcgcaaacacagacttgaaatcgatcggctgagccttggcggcctcggtggcgtcataggcggtctgccaggcgtcgatccaagaaccgagatcgaagttcttcagcgtggcggccagatcggcgtaatcagtggggttgtaggtcttcaccgagtcgcgcgtggccacattgtcccaatggttggcggcgatcttggtttccacggcaaggaagtggcgggccatgccgagcgcggcttcgctgggaaccgtggcgggagcgttgctctcgtcatcgccggtgttggacggcagctcatcgccaccgttggactcggcggcgggcgcgtatccggcgttcaccagctgggtggcgaccatcgccacgtatgcttcgcgcacgggagcatagtggtcttcgcgatagtaggcctcatccggcaagcacaggccggcctgctcaaggtgggcgatattgcggtccgggtcgccgggatcgccgtaaacggccaagccgaacaggtcggggccgccggctgggttgatcgtgccgagcacgcgcgtgagagcggccttgtcgatggcggaatcgatgaggtcaagctcgtcgcggattgggtcaaggccggcggcctctatggcgtcggtgttgaggaatgagtggtacagggcctcagacttgacagccgggcagtcgtcggcgtcgaggatgtcgcgtacttggttttcggcgtcttcggcaagcttgtcgaaggagccgtagcgcgaacggtcgtcgggtaggcggtaggtgtcgatccatgggccattcacgtagcggaacaggtcattggtcggcttgatgacggaggagaacgatgccgggtcgatgcccgacgtcagcgtttcggtttcgttggtcatggccctaagcctaatcgcggcgggggagaagcgttgatggtgcagatattgcgttatgggcattgcgctgtcagtgaactaggcagattgcctaattgtggtgatggttcaaattagacaacttgtctatcatagtatgtggaatctgaacatggaccttgagctaaggagttacgatgagcaatccaaacgagggccagtggaatggccagacgggccagcccaaccagagccagccgagccagccgaatccggcgggccaaccgcagtatggcgcgtatgacagcaatcatggcggccaatatcctccgcaaggcgcgccgggagcgcaagacactcagaatcagcaggcgcagaacggccagccacaaggcggaccgaaccagaacccgtactacggcccgtacgcctacaatccgaactatggcccgaacggccagccggcatgggggccggacggtcggcggtatcagccggacggccaatcgaatagccaagcggacgggcagccgaatggtccatggggcgatcaaagtcaacccggctggcagcagaccaactggtatgtcggcaatttcagtccattccgcctgatcgaggaatggctgccggaaaaagccaagaccaagattcgcatcatttacggcgtggtgggcgtggccgccatcgccttgggcgctgcgctgttgctggtgccgaacaagacgctggctttggccgcattgttgctcggcgtgtatttcgtgatttccggcgtggtgcgcatcgtcagcgctctcgtggagccgggtctgccgggcggctggcgtgtgctggacgtgttcgtcggcattctgctgacctttggcggcgtggtggttgtgcgcaactacggcatgaccggtcagacgctggcattactcattactttgatggtcggtttcggatggattatggaaggcgtgctgtcgctggttgaatcgtggcgtatcccgcattccggctgggccatcgcctatgccatcatctcgattatcgccggcttcgtggtgctgatgagcccgctgagctccgccgtattcatgattatcttcggcggatgcgccatggtggtgatggggattacttcagtgattcgcgcgttcactttcggcaagcgtcgcaagtaatctcacgcttcatgcaaccagtccccagacaatcaatccaaagcgcccgtgcaggctatgtgctgccgggcgctttttctcggccttggctattaatgggctgcgagtggatttcaggtaggcttctggcggttgacctcgggctggtctagagttgagaacaagtctcaacaaggtagaaagaatctcatgatcgaactgaaaacccctcgtgaaatcgaggaaatgaagccggctggtcgttttgtcggcggcattctgaaggaactgcaggagaccaccaaagttggtaccaacctgctcgaaatcgacgagttcgtccacaagaagatcgtggaccgcaagggcgccgaatcctgctatgttgactacgctcctgacttcggcaccggcccgttcgcccactacatctgcacctccgtcaacgacgccgtgctgcacggcgtgccgtacgactacagcctgaaggacggcgacctcgtctccctcgatctcgccatctccgtggacggctgggtggccgattccgccgtcagcttcgtggtcggcaaagacccggaccccgaagacctgcgcatcatcaagtgcactgaggaagcgctcgccgccgccatcgacgtggccaagcccggcaaccgtctcggcgacatctccaacaccatcggcgacgtcgcgcgcgaatacggctacccgatcaacctcgagttcggcggtcacggcgtgggccacatcatgcacggcgacccgcacgtgccgaacgacggccgcgcccaccacggctacaagctgcgcgaaggcctggtcatcgccatcgaaccgtggttcctcaagaccaccgacgagatcttccaggatccgaaggacggctggaccctgcgtgcctccgacggctcgcgcggcgcccactccgagcacaccatcgccatcaccgagaacggcccgatcgtcttcaccgatcgcaccaacctctgatcggcgtttggcgtatggtaggtgcctgattggcctgtgatgggcgatcagcgtctcattagctgtccgtctgttcgcggttttcccgcgaattcgagacgtaacaagccgaagtgcgtttgctttgatagcatgagcgcacttcggctttcgtgtatcgaccggcattcgccagcggtaacacagaagacatagagtaccgaacactagtgttcgcgaacgcgtgaacgttaatgtttggggtaagtggttcatgaagaggaaggtgcgcgaatggcaacggcacaacttgatgtcgattcgaacaagttcaacctgcccgtggttaaggctagtgcagggccggatggcatcgtcgtttccaaactgcgcaacgatggctgggtaacgcttgatcccggattcctcaccaccgcgcagtgcgaatcgaaaatcacctacatcgacggcaagcattcgattttgcgctactgcggttaccccatcgagcaattgtgcgagaactccgattttctggaggtggcgtggctgctgcgccacggcgagctgccgagcagggctgagtatgagcagttctgtgcggacatcaatcacaagacgatggttggcgaagacttccgtaccttcatgggttcgttcccgcgctccgctcacccgatgagcgtgcttgcctccgccatcaatgcgctggccacgttctacccggacaccaccgatatttctgacaacgaccagcttgatgaggccgccaagatcatcatggccaaggcccgtacaattgtgtcgtacatcttccgtcgtcgtcgcgatgagccgatgctgtaccccgattacgcgcgcggctatgtggacgacttcctgcgcatgtgcttcgctgtgccgtacgagccgtttgaatccgacccgctgtatgtgcatgctttgggtcgtttgttgattattcatgccgaccatgagcagaactgctcgacctcggtggtgcgtatcgccggttccgcccacgctaacctgtattcggcggtggccgctggcgtcaatgcgctgtccggtccgttgcatggtggtgcgaatgaggccgtactgcgccaattgaaggcgattcgtgattccggcaagtctgtggccgagttcgtgcgtgatgccaaggagaatggccagaagatttccggccttggccatcgtgtatacaagtcgtacgatccgcgcgcggcgattgccaggaagtatctggaaaagatcatggagcgcgaagatacgcagaagctgccgtctgacgagcgcgcgctgttcgccgtggccaccgagcttgaagatattgcgctgaatgacgaatatttcgtatcgcgcaacctgtatccgaacgtcgacttctacacgggcttgatttatcgggcgatcggcttcgatccggccatgttcaccacgctgttcgcgctgggccgcattcccggttggattgcgcagtaccgtgagatgttggccgacccgaataccaagatcggccgcccacgccaggtctacaccggtccggtcgagcgcgatttcgtgccgatggacgagcggtgattgttggtttgagaaagcgcctcgctggagattccagtgaggcgctttctatatgtacagcgcaaaccagctatgctgcgacggctgcataagaactagcagggctagttctgaaattgaaataatgtgtgcggtatcgaggcgcaccgagggaaggcgtatgaaggtacgtcgaccgaggggcaacgaagataacgctccactatttcaatttcagttcttgtgcagcttggcgttgagctcaattcccaccttgcggtagcgggcttcgatgcggccgttcaccgagttgcggataaacagaatgttgtctttgccggagagctcagcacccttgaccacttccagcggctcgccagcggcagccttggccttgtcccagatggtgatcttagtgccggcggtgatgtacagaccggcttcgacggtgcagttatcgcccagagagatgccgataccggcgttggcgccgagcagcgagtgctcgccgatggaattgcgcagcttgccgccaccggacaaggtgcccatgatggaggcaccgccgccgatgtcggaaccgtcacccacgaccacgccttgcgaaacacggccttcgaccatggagacgccgagcgtgccggcattgaagttcacgaatccggcgtgcatcacggtggtgccggaagacaagtaagcgccgaggcgcacgcggtcggcgtcgccgatacgcacgccggtgggcactacgtaatcgatcatacgcgggaacttatccacaccgaacacgttgacagtggcggcaggagctgcggcaggcagtccggcctgggaggcgaaagcgagagcggcttcggtggaggcgcgttcgacgtcggccttgcgcagcgtgaagtcttcaacggcgaaggggccgtagttggtccacaccacattggcgagctgggcgaagatgccgtcgaggttcagcgtgttcggcttggccatgcgcatgctcatcaaatggagcttcaggtaagcgtccgcggcattactgatcggctcgtccaactggctgacgacgaataccggcacgcggcgaatgccacgggcgtcggcctcatcgtgagccaaagtaccgaaattgtggttcgggcgatcggcctcggccggtgcctcaccgagattcagttcggggtaccagacgtccagggtggtgccggcggcgtctacgctggccagaccccagccccatgcggtacgctcttcgctcattgttgctccttattgttgtacgcgctagtgcacgcttgtggacgcgcgatgcgattaatgattcccaccttagccttatgtgcgcctaggtgagggacgatgcccgcgaaatggcttgaaatcgtatttcccggtaaaaaattaccgagtgtgattggcgatgggatgataggttctccggtgaaattcgctggtgaacaactcgacaaggaggtgtgcgatgtgatgttgcatcattcgggagcataggctgtggccatgcgacgcccggcatcatagagtttgcgcttgagcgaatcgggctcaagaatcactacgcggccatcccaggaatactgcaatgcccaccagaacacagcgcgttcgggagcatcgacgatgacttcgaactgtgtgccgtccggcgaatgtttgatttgagggtcgtcgaaccattcgaacacgttgttgagcatggattcgtctcgtacggccatgcggatgcgaatcggggcatcggctacggggtatggacggtggcgcatgaagttcactgcgtcaaaatcagctggtgctggtttttccagtggcactgtgccgttcctgcctttggcgctgacgttggcgattcggttgaccacgaaaatgcggaggttgtcttcgccatgcagatggcagatgaggtaatagcgtccgttcttgtacaccatctggtacgggtcggcggtgtaggtaattcggcctgcacccgtacggcttttatgtggtatcaaggtgccatccgggccgtaatcacggtattggaaggttacgccgtggccttcttcgatggcttgattcagctggtcgatagtggataggaactcaccgttgatatgcgtgtaggtggccacatggtccaggtagcctactgcctgcccggcggcgcctgcgagctcgcggattttaccgatgaggtcgtccatggtgtcgaggctgatgcgagatagggtaagactgtctagcagcagtcgcatttcggcggtggacaggaatgcatcaagataccagccgggttgtggattcttgcattcgatgccggcaaggtcgctttcggtgagatgcccgatatgtctgccgagaaattccgtggaggtcagctttttgagctggtttcgtatggtcttctcggtcggcagctcgcttggatcttccagctggtgtttacgggcaagctcatcgagtatttgccgcacggtcaggccatgcccaaagtaactgtgacgccacagcacctcgaagatttcgagggtggtgttccctgcataggatttgcgttgcgccggcttgtctgcatccatacattaaggctaccgcgcgcttcgtctaggatggaaacgttgggttgaaatacattcgctggaaaggaggctcgcccatgagcaaagggtatggtgtgtttggccatgttcccgagaatgcggatgacgatggcctcctgccttatggggatgatgattccggcgtttcctggggccatgcgttgcgtcgtcgcaatccttggaaaaggggagacgacgaagatgccgattacgacgacggtcggtatgacatagatgacactgatgacactaatgggggcaggggcatctatgccggtaaaagcggcggagtaggcggcatttctggtgagacgggtggaatacttggtagctcaggcgcggccggcagcagagacgtaacgtttggtggaacggacagtttgtccgccgccgatgcggtgatgccctatcgtttcaggcaaggacgttccgtatggttcgacgatgaggacgaaggccatttcgccgggtctgcgaagcgtgccgaagcccatgccgtccctatccttgcgttacgcaacgatgtggaatcgtcatcgtcgaatgccgtgctcgctcgtgcccgtagcattgcgcgcaaagcggccaccatggttatcaatccggtatacagcgaaaatcatcgaaccgggtatgccgagcttgacggtattctacgtggcaccaccagcccatcgagtaggtatcgtaccagcgtgcaattcgacctcgatacgggagaagccgtcggtggcaagtgctcatgcccggcttacggccgtggctatggcatgtgcaagcacatgattgcgctcgccttcatattctgcgatgatccgcagcgttttgaaggctaccgtgccggggccgcacgaccgtctcggacgctgattgactatatggagcacgccgataggcaagacgctcaagccaaaattcgtcgtcgcaatgcggttatgcgtcggtttgatgccacgcaagggaaaaacggtgcaaatgctcggcgtacaaaaagcggatacggctctcgtgccggcacccgaggcggcgggtatcagggtgacagcgagactgtgggcttggggcaggtgcagcttgtcccgatattgagtttcatcgacggcgtgtggagcgtggagttcaagatcggctcggcttccaatgggtccagctatgtgctgaaatcgattccgcaatttgtgcttgccatggcgaacggcgactatgcggattatgggcagaagcttgcctttactcatacgccggatatgcttgatgatgattcgcgccccctgctggacgtccttgatgatgcgatggccgtgcgtcgtgcggccgagcagcaggacaggtattacgggcatatcgccatcgaccgtcatctgacgctttcagcaccggaagtggcccggttgctgtccgtacgtgagggcagaggcgtacagctcgtgctgaacacatggttctccgggcagcctgcatcggtgccagttgatggtggcgagccagattttctcatgcgcattgcgcggcgtgatttcaatacgtatggtccggatgccggatacctgcttaccggagtgccagcggtggaaaccgtgattgacggcggcaagaatgtatggctgttgctcgcctccactaatccggccggtgcggtatccgccatgatggcgggctctcagcgtaaaagcgcagcaggatgccgattcgtccgttgcccgaaacgattgattccgttgcgaggactattgggagacctgtttgaacccgatggcgagggacaggtcattgccggcgatgacatcgccctattcgcacgcacgctattgcctcagctggttggtgccggactgttggaggccagtgagattcctcgcgagctggctgaattaagtcctacggaatgcagcctccagttttatctggatcgtgatgagcatggtgtgcaatgcgaggtcaaggcacgctacggcgatgccattgtcccgttgctacccgatggcccgacggtgcatgctgagggcgagcgttccatccccttgtctcggggcgtgattgggcgtgatttcgacgctgagcatcttgcgattgatgtagtgcgtgaattctttaccatgcctgaccagcgcaagcgcgttgcggccgccactcatcagacggtgaatgggttccgaacgccggccgcgcgaaaggccaccaaaaaattcgtgtctgatgcggccactatcgatcgcgatgacaccacgcagatcgttcgtctctttgacgagggattgccggcactaaaggaagtgggggaggtcttcaccacaccggcttttgaccggctgatcgcgcccaagccaccaagcgtcaaagtcggattgtccatcaaaggcaacttggtggagatatcacccctcgctgatgaagtgccgccggacgaagtgggtgccttgctatcttcgtaccgtcggcgtcaacgattccatcagttgaaggacggcacgcttgtcaaactcagcggcgcgaatctcagcacgttggaccgattggccagcgacctcgatctgagcgagcagcagctcaactccggactgatcgagttgccgggcggtcgagcattcctactggatggtgagctgccggatgacggctccgatgtagtcaaggacgcttcgttcaccgaatacatcgacgatctcaagatcatcgaccctaagtcgtatgaagtgccggatagtctcaagcatattctgcgcccttatcaggtcgaaggctttcaatggctgaacacgttgtgcgacaagggttttggcggcattctggccgatgagatgggcttgggtaaatccgtgcagcttatcgcgttgctcctgtctcgatatcagcggaataccggcgagatgggcgacggcagccttggcccatcgctgatcgtgtgcccggcgtccttggtgtacaactggggtgccgaattcaccaagttcgccccgagcttcaatgccgtggtggtggccggtaccaaagccgagcgccgtaccgccatcggccgtgcgttccgggcggatgaacccaccgtgctcatcacctcatacgacctgctgcgccgagatgtcgatgattacaccgccaatgagcaacgtttcaatgtcatggcattggatgaagcccagtacatcaagaatcacaccacgaaaatagccaaagcggtcaaggccgtggccgccgaccatcgtttcgccttgactggcacgccgatcgaaaaccgactctccgaactatggagcattttcgacttcctgatgccggggctgctcggctcatataagcgattccatgagcgttatgagttgcccatctccaatgcccgggccgcggatggcagcacggctgaaggtcgggccgccgcacaagtcaatcctgaggccgctcgggtatctcgccaattgcagtcgttggtgggcgtgttcatcaagcgcaggctgaagtcccaggtgttgaccgatttgccggacaagctagagaccacgctgaccgtgcggcttgccggcgaacagcgcaaactgtatgcggctcacgagcagcggctcagaatgcagctcgaacacagcgaagaagccgatttcaacacgtcgaagattcgcatcctcgccgagttgaccaagttgcgccagatctgctgcgatccgaggctgctgtacgccgatgccaaggatcaatcggccaagcttgccgccatcaccgaactggtggaaacctgtgtgaacgaaggcaagaaggcgctgatcttctcccagttcaccagcttccttgatctgatcgccgaacgtttcgacgcgcaaggcctgcgctactacaccatcaccggctccacgcccaagaagaagcgtctcgaactcgtcgaccagttcaatgcggacgatacgcctgccttcctgatttccctgaaggccggcaacaccggactgaacctgaccggtgccagcgtggtcatccacgccgacccatggtggaacgccgccgcacaggatcaggccaccgaccgagcacatcgtatcggccagaccgaagacgtcaacgtgtatcaggtggtggccaaggacaccatcgaagaacgtatcttggagcttcagcatactaagagcgagctcgcccgccagttcaccgacgcttccttgcttgccgacgaagccggcaccggcgccagcgccctcaccgaagcccccgcctccatcgccaccctcaccaaggacgatctcctcaatctgctggggtgacagagcttctttgtgcactccccatcccgattaagaacatgtgtattcatgggtttgcggatgtgtaggtgaatggtgaaagtgtttttcgatatttttatatcgatattcgatatattatgatggtggcatacggtgcagtgcaggttcatccattgatattgatattggattaagaagcatagccatgaacgctggtatcgcattcatttctcgtaaatctcgcaaaacagacgtcgcttggcgctatgccattgccgtggtgcttgtcgtgtgttgtattgggctcgcatatgtggagattgttgtggcgccgtggtttatcaatgaggtggtgtctatgtttccggagaccacgttgcttaaagaaccgtccatgttctgggaatgggcgattctgctcgccgttcaggcgactttgctgtgcacggcggccaaattggtggtaccggagcgtctgttggctcaagcagctggactgctggatatgattcgtatcgtcgcgcttatcgtcgtgttttcggtaaccactaccggtaacatcacaatctgcctcatgaatttcggaactccgggctttgtatatggcgtggccctatgcagcctcgctgcgatcatcgccatcatcgtgctgctgaaacggcggcgctacagcacctgctccatgccgatgtgatatggagtgagtcccatgcgttcgtagaaggcttgggctttggggttgcaggcccagacgttgagcgttacgttgtggcagccggattgacgggcgaagtcgagcacgtagcgatacaaggtggagcctacatggtggccgcgggaccgctcgtcaacgcatagatcatcgatgtacagggttttgatatcggtcaggatattgctgttgaggtgctgctggaacacgcagaatgcgtagccaagcacttggtcggtggcgggggagtcggcgttatgttcggcgtcagtgccgtcattggcagatggcgcaaccgccacgaacacaggggtctgatcgttggccagaatcgccttcaattcctcgtccgtgtatttcttgacaccgcctttgaacagatccggtcggccggcatgatgcacttcgagcacctgccgcagcagttcgtcgatttggggaatatcggccgccgtggccctacgaatcgtcatgtcatccattgaactcagtctaatcgggcagtctcgaccgacggatgatcattgcccgcgataagagacgcggacggacaagatgggtgatcgttcgttcagggtctcattctcgccgcaacgtcacggtagtctggagtgcgtgaatcgcaagaaacagccagtggagaagtatgagcggggtacccgttcgtacacgatgtcgcatattcgtggcaaagacaccaaaattgaggtactggtacgcagctacctgtttcgcaaggggttgcgattccgcaagaacgacaagcgttaccccggacacccggatgtagtactgccgaaataccacgccatcgtgtttgtcaacggctgtttctggcacatgcatgaaggatgttccaaacattcgatgccgaaatcgaacgtggaattctggcaggcgaaactactgcgcaatcacaatcgagacatcgcgcagcgagccgaactggaggccgctggctggcgtgtaattaccgtatgggagtgcgaattaacgaaagccgtgcgcgacgaacgcctcgcacggctgtatgagcagattgttgaaggagatgcagattcagcggaataatttcagctcccctctggaggggagctgaaatcaggattcaaacgggaacttcaggccccaacggtcacgaatcgcatccatcagctccatgatgcggatggtgtcggcgtgcggcatcgcctcgcattcgatcttgccgtccagcagcgcgttggccgcatcggccacctcatactcataaccggtcaactgcggcggcaccgcaatgctgcgcacgggcttgtgggcgttgtcatagatgtcgatggactcgggattgttgatattggtgaccaccagataaccctcggtgccccacacatagccgccgcggtcggaggaaaccagcatcgaactggtggacacggccatcgtgccgtcgctgtaatacaacgtggtggaattctgcgcatccacaccggtttcggcgggcaccatcgacgtatcgaaatgatcaagtgtacggccatggtcggcgccgaccgccatatccaggaagttcagcggatacacgcccacatcgagcagcgcgccaccggcacaggccggatcggtcatacgtgccttgccggacaccggatagcacaggttggcgctcgccgctttcacctcgccgatctcgccggactcgataacttcgttgatgagcttgcggctgggcatgtagcgcgtccagatggcctccgtgcacagcatgccggtttcctcggccacggccagcgcctcacgtgcctgcccggcgttcgcggtgaacgacttctccaccagcacgttcttgccggctttcatacacaggatcgcctgttcggcgtgcagactgtgcggggtggcgatatacaccagatccacatccgggtccgccaccaactcctcatacgatccataagccttgtcaaaatgccattggtcggcaaaagcctgcgcgcgcgtaatatcacgggccgctaccgcatacgggtgaatccatgaggaatacagtgaatcttcagccatctgggtcagggtgccggccatggtgtgagctatgcggcccgcacccagaatcgcgacgttgattttttcgccgctggcctcgaactcggcgcgcttgccattgaatcgactcattattcctccttgaatgcgggttggtacactcaatcgacctacagtgattatagaagaagaaaccttgtcccgtgaggcggatagaaccgaaatatggaaaacgaagcagcgcagcagccccaatctccggccgcgtctccagtcatgtcccgccgagcgcgtgaggccaatcccttccgtgccatggtattcggcgaacaagcagacaagatgatcgcccaaggtaccagcgtcatcaaattaagccttggcgagcccgatttcggcgcgccgcccgccgtacgcgacgccatgcgcgaacagtacgacggccgggccctgccgtacaccgccgccatgggcctacctgaactgcgtcaggccatcgccgacttctaccgcgagcgtcatgaccttgacatcgaccccaagcgtatctgcgtgaccgccggcggttcggccgctctgctgttggccaccgcgctgaccgtggaccccggtgacgatgtgattgtggccgacccctcctacccatgcaaccgcgaacttgtgcggtcgtttgaaggccgggtcatcgatgtgccgacctcggtcgccacccgcttccacctgaccgccgacctgtgcagccagtactggacgagcaagaccaaggccgtaatgatcacgtcgccgtccaaccccaccggcaccaccatcgacttcaacgtattggacgaggtgtgcaagttggccgccagccgcggcgcatggcgcatcgtggacgaaacctacctcgacttggctgaccgggagccggacggtaccgaagtcaaatccgtgctggcctgcgaccccgatgccatcgtatgcaacagcttctccaagttcttcggcatgaccggctggcgcctcggctgggcgattctgccggacgagcccactgtgctggaagcggttgacgatctggccaccaactactacctgtgcgcccacacgcccacgcaacatgcggcgctcgcctgcttcacgcaggaaagcttggcggaatgcgaagctcgtcgtcaggaattgctggcccgtcgccgcattgtgattgacgggctcaagcgcatcggtttgccggttgaggtggagccgaatggcgcgttctacgcctacttcgacatctcccgcactggtctggatgcctggacgttctgcgaacgcgcgctggatgaagcccatgtggctctgactcctggccgcgacttcggcgcggccacggcggatacgcatgtgcgcctgagctatgccgcctcacgtgaggccctgaccgaggggctggaacgtctcggaacgttcgtcgaatcgctgtgaacggcgcggcagccggtgtgattgttgtacagtagtcgagtttgtgtgatgttcggctggcctcacggtgttggttgccggccgaacgactcgccatggtggcgcacggctggctgattgcgatggtcggcccgttgttcggccatcacgggttaggtaaggtcaggaataggaatcatggtcaatctgcgttcgcataccacgcgacttggtgtgcttgatatcggttcgaacactatccacatgcttatcgtcgacgccgcccccggcgctcgccctgaccccgaggccagcaccaaatccacagtgcgcctgatgaagtatttaaaggacgacggctcaatcaagaagtccggcatcgaggcgattctggaagccgtgtcccagtgcatgcggctggccgaggaatacgaaatcacccagctgctggttatggccacctccgccctgcgcgaggcgccgaacggcaacaaagtgattcacaagatcgaggaactgattggtcagggcgtcactgtgctgtctggcacggatgaggctcgcctgaccttcctggccgcccgccgttggtatggttgggatgccggccgactgctggtgctggacatcggcggcggttcgctcgaagtggcgatgggctccgacgaagagccgaccgtagcgctttccgccccggctggcgcgggccgcgtcaccactgaatttctgccttccggcatggccacgcccgacgagttggaagacgtgcgtaagaacgtgcgcaagattctggagccgatggtcaaggttttcccgcaatccaagcacccgaatcatgcagttggcacctccaagaccttccgctcgctggctcgcctgtgcggtgcggtgatgcgtgcgccgggccgcgaagattcatggattatgactcgtgagcagttggaagactggattcctcgtttggcggcgatcgcgcctgagcagcgcgtggctttgcccggcatcacgcctgaacgcacgatgcagattgtgggcggcggcgtggtggccgacgagatcatgaaggccctgaatattcaggaagtcgagatctgcccgtgggcgctgcgtgaaggcgcgattttgcgctggctcgaccaattcggccgcacccgcctcggtttctagtcctattgaggggaatcacccaaccgccacggtagccaacaatgccgcatgatcagagccctcgactttgaccaccttgcattgtccggccttcatgccctgatcaagcaccacgtggtcaataccggcgaacattggcacagccgcacggttcgtgggccatgagaacgtaaacccatgtccggattcacgtgcggcatccacgaaccggtcgccaagaaaatcacggaatggcgtgtgatcgtaagtggcgttgaaatcgcccatgaaaatataccgtgtatccgtatgctcgcgcatcagacccaactcatccagcgatcgcttccactgccgccagtagccgggtacgggagcggtggtgtgcacggatacgaatcgaatctgctggccacccatatccaccgtgccgccgggcatgaatgaggcgctggaattcacgtcatcgtcggtcggatcggcaagtggcgtggccgaccagaggccgttaccgaatacgccgtcagacgatgagacctgcgcatacggcagataatgctcaataccagcctcattgagttttttgacgaaatcctcggtggtctcctgcaaagcaagcacttcgacgcgctgatcgcgaaccagctcgacgatggcttgcgggtcggcctgccccttatacacattgaaggtcatgacgcgcgcgtaggcatcgctggtgttgggggaggctgcggccacggcgttctgcgcggcttgggggagtggatcggtcgagtagaagaacagatattgccaatagccattgcatgcgattgcggcgatggcgattagtgcggcaaggatacgccgcgacacgatggccaacagcagggcaatcaagccaagcaacgtgaaccatggcgttgccgataccacaatcggcgcaaatggcagttcctgtaaatcggcaggcagcgcgcgggcggcagcgccggcaagggcaagaagcgcgaacatcgtggcgagaaaaccaagcagacgatgccgtttgtgtggcttcacggcagacttggatactgggcgtgccgtggctctggcagagcgtggcttggcagcggcgcgagctcgtacgcttgcgcctgtggtagtactccgtgcctttgccatgctgccctttcctccggcttgtttactgttactttgcttttcgtgcgatttgccactgtaccgtgtacggcttgtctttcagtgtcttttcgccgtgcgcaagagcagttcgcaccaaactggcacgaaagaccgggccatgacctgatgtcgggttcctccatgtggcttgctcaggttgccggatggcttgcgcaagctgccacgcgaacatgatgcgactgggcgtgtggccgtgtacaatgaaacgtcgttgcccgagtagctcagtggatagagcaccgctctcctaaagcgggtgtcgtcggttcgaatccgatctcgggcacttggcttcggaaacatgacggtatctcagcctctattcatcggtgatgagccatgggcattaggcatgtgtaaacgtataggttccactatccatcatcccgtcgtgtgaaactatgcaaagacatgtggggcttcacggttgtcgtgagggtccatggctatcgaatgcacggaagagaagcggtttactgttgagcaggttgaggcgctgttcaagtcggtaggttgggaatcggcgcagtggccggaacggttgttcaaggcattgcagcattcggatacggtgatcagcgcatgggatggcggccatttggtcggcttggttcgcgtgctcgacgatacgggagggggcgaaagtggcggagtgtgctgatcgggggcaacgtacgtagtcattgacggttatcccgtagtaatgttcacgatacgaccccttgtccatacagtgaaaataacggctggcgtccgacgttgctgcgctatgactagagaccatgagtgaagacaaacagtatgacttctatgtggccggtccgttctttgatcctgaacaaacgtcaagtatggaacgtttggaaaagatattggaagaccatggcaaggtactgttcaagccgcggtttgtcagccagatcgaagaagtaggccctgaaggatgctttgcggacgatatccatggcattaatgctgctaaagccgtggtcgccaatcttatggacgaggacccgggcacgatgttcgaaatcggatatgcgcatgcgctgggaatcccggtgtacggctatttcgaaaaccttacgccaatggatcgtgtcaatctgatgattgcgcaagcggtcgaactggtgttcgtcggtcctgatgatgtggcgaaatacttggaaaccggcgaacatacggaagtcgattacatccagttctaaacagctctaacaggttctctgcaagcagggttggcggcgttctcgtacatagtcatgtacgggaacgccgcagtggtatagggatattccaacaagcggcataatggggtcgtgggaaaaccagtcggatacaagtgaagtgtctgaatttcgtaaggagtgccgttatgagtaaccacaatcccatgaatattgccaccgactttgccaaggccacgggaggaaccgcttgcaaagttgttgctttgaccgataaaggtccgttgaatggctttaagaaattcctgtcgcgcggatcgatgattgatatggcggtaggtgtggtgatgggctctgccgttaccgctgtggtcaattccatcgtcgacaatctcatcagtccattaatcggcatgattggcggcgtaccggatctttccggactgctgaccatcacgttcaacaactcgactgtttcatttggtgcgattcttaacgcgctgattagcttcctgcttgttggcgtggcggtgtatttctgtgtgattttgccgattaataagcttcgtgatctcactgctgcccaggatgaggctgacgctgaagaacaggggcctagcgttgaagagcagactctcgccacgctgcaggagattcgcgacgagctgaaaaaggccaatgactccgccgagtaatctgctgaatgtacggtgcgacagatttacctggtttgcccgaaataacggattgccggggccatttggtctggacaatccgttgtttcgcgcgtgttttgtagcatccgtggagttacatggggagtatgactgaaaacatcgctgataaggccataaacgatactcgtatcgtcaagcagttcaccaatcccgtcaaggagccgattgacagcgacatcaacctgttcgatttgctcgatgagcgagccaagcgcgatcccgatggcgccatgatcgaatataaaactgaggatggcacctggcagccgtacagcgcccaggtcttccgcgacatggtcatcgatctggccaaaggcctgattggtctgggcgtcaacaagggcgactccgtggtcatcgtgtctcgcacgcgttgggagtggaccgctctggatatggcgatcatgtccatcggcgcactcaccgtgccggtatatgagaccaactccgccagccaggtcagctggattttcaacgattccaaggtcacgctcgccatcgccgaggatgacggtcagcgcgacaagattgaatccgtgcgcagcgaggtgcccaccctgcgcaacgtgttcgtcatcgaagcaggcggcctgaacgccatcaagacctatggcgaaagcgtcaccgatgccgaattctgggaatacaagagcgcctcccacggcgacgaccgcgccaccatcgtttacacgtccggctccaccggcaccccgaaaggcgtggagctcacccaccgcaacttcgcgttcctggtgcgctccggcctgcagtacatgcctcgtgccggcgcatggcccaaccgccgtctgctgctgttcctgcccctgagccatgtgttcgcccgattcctggaattcttcagttttggcggcaccatttctctggccctgagctccaatatgaagaccatggtcaaggacttcgagaccttcggccccacgctgctgcttgccgtgccgcgtgtgtacgaaaaggtctacaacgccgcctcccagcgtgccggcagcggttttgcgggcaagatgttcatgcgcgccgccgaaaacgcgcgcgaatggtccaaggccgagcagaagggcgagaagctgccgcttcccggtcgtattgctcacgctttctacgagcaggtggtgtacaagaagattcgtaccatctttggcccgaacgccgactttgccgtcaccggtggagccccgatggattccgagctctcccacttcttcaacggcatcggcatgccggtgctggaaggctacggcatgacggaaacctgtggtccggtgtgcgtgagcttgccggaagacaatcgcatcggcaccatcggcatgccgatgtgcggcatcaccgccggcatcgccgaggatggcgagctggtgatcaagggaccgctggtgtgcaaggggtaccacaacaaccctgaggtcaccacccagcagatcaccgatggctggctgcacaccggtgatttgggcgatatctccgaagacggattcatttccatcactggccgtaagaaggacctcatcatcaccgccggcggcaagaacgtgtcgccgggtctgcttgaggcttccgtgatgacctcgcccgtggtcaaccagtgcttggttattggcgataagaagccgttcgtggccgctctggtcacgctggatctggcggatgccaacaactggttggaatcccaaggcgccaaaccggaacccgatctggcctcgctggccaagaacgccatcgttcacgctgaggtggagcgtgcggtgaacgccgccaacgagggcgtttcccgcgccgagtcgattcgtaagttcgagattctgccagacgaattcaccgaggccaacggcatgctgaccccgagcctgaagacccgtcgcgcgcaaatcgttgagcactatcgcgagctcattgacgacgtgatctacgtgccgttgaagaagtagctatcaactccctctgatccaaaaaataagctctctctgacgagggaactgtcagccgcaggctgactgggagagaccgcggctagcccgcgaaacaacaaggccgggtgcgacttgcacccggcctcagcttattcagtccaaaatcgccgaaacataatcggcggcggcctgatccagctccgcatcgccgatggtggcggtgccctgcaccaggaacggctcagcatagttcatgccgaccttgtacgccacgacctcaaacgggctcagcagctcctccatggtgtggctgtactcgccatccttgcggtacttggcggcgtcggaaccagtggtgaccaccagcttgagctccttgcccttgagtgcgtggcctccaccgtaggcccagcctgcggtgatgacctcgtcttcccattccttgagcagcgcgggggaggagtaccagtagaacgggaactgaaggattacgcggtcggcagcctccagcagctcgtgctctgtgtcggcgttgacggagaagttcgggtattcggcgtattcgtcgcgcacgatgatgtcgtcctcgccctgtgcggtgagttcggcgagcaggcgggcgttcacgcgcgagccgtccttaagatgcggatggaatacaagaatcaacgttgacatgggatttcccttctataaactgctgccaatgtggcctaatcaccactatcgtatgccgggaagcagaactcagtccagtccggactcaggtgcgagccgcgggatgccgcgccgggaggcaactcagtcgaggttggactgcgtgcctgcggtggcttcgttggcggcttgctcggcttgtgcttggtcgagcttggcacggacgtcgttgagcagaccctgggcgcgcttagccaaggcctcgccgatctcccattgacgcatcgactggtcaagattgaggccgccggtttccagtgcctggacagcctgaatcagcttgtcgcgcgcctcctcatatggcatctgggcgatgagctcgcgttccttgtccgtcagggacgtggcgggggtgttcatgtcggtggatgtggcgttttcggtcatgatgttctccttatatatacggtatatatgcgtggctgcgtatggcgtgtcacgcggttgcggatgtggtggttgcggtaatgacacccttcttcaaggtgacggtgatgccatccccagggcttacctgcgaagcatcgtctagtacgtggccatcggcggactgcaccaccgcatagcctcggttcaacgtggattgcgggctgagtgcggtcagtgaggcgtgagctcgctcgacggtgagctgggcatcgtccacgatgcgtcgcagcccgatatcgagccgttgcaacgagtcgtcaattaagcgctgatgaggctcaagcatggtgtgcggctgtgtcaggctcgggcggttcgcatatccctcgataagtcgaatctcgttctccacgcgcgaacggacccgcagtcgcatacggtcgatggcaccttcgatgagctgcgactgctcacgcacatccggcaccacgcgcttggccgcatcggtaggggtggaggcgcgcagatcggcgaccagatccagcaatgtccagtcatcctcatgcccgatggaggagattaatggtgtagtgcaggcatacgccgcacgaaccacacgctcatccgagaaaccgatgagatcctcaaacgagccgccgccacgggccacgatgatcacatccacgctcgggtcggcatcgagttgtgcaatggcctgaaccacctcggccgggcattgctcgccctgaacatgcacatggaccaccttgaaggttacggaaggccaacgaaggttcacattggtgatcacatcgccttccgcacgtgcctgaggtgcgcaaatcaggccaatagtcttcggaaactccgggagaggcagtttgtgatcggcgtcgaacaggccctcgcccttaagctgcttgcgcaattcgtcgatcatggccttgaggctgccaccggctccgaccttgagaatcgtgtccccgcgcaacgacagcgaagtgcgcttcatccacaggttcggtttgccgtgaatcaccacgcggtcgccctgaacgaactggctggccgcggccgcgaacctgccgaagccattgacttccatggcgatatcctcgaagtcgtcgcgcagcgtgatgtaggccgagccggcgcgacgggtattgatctgcgtgatctggccggtgacccacgcggacggccatcgttccacggcaccgtagaacttctggctcagcacgcttaccggccacggattttgcgcggtggtttcagcggcgcgtgcaggcagctgatcgatggggcgaggctcattcggcagattgatggcgccccgatcgggcgcgaaagtgccttgacccggctcaaagccagacgaggccagtgaagcggcggtcggtggacggccggtagatgagtagcccattgcagtagtcatgcactccactataagtgcgttggttgatgacggtaaaaatttaccgtcgcctgaaaacggtgtgatgatgaatgcaagaaccgtacgaagcgatgtatcagccgatgatggagatggtctggtgcatcagaagaaaggagtcattatggcgaagaaacgggtgctatgaagaggagtgagatatgcgttgcactgacgattgagagtcgtcagtgagctcgctgtgcgacacgcgagcagaaaacagttacgctaatcacacacttgtagttttggcgaaaaatagccgaaaaaccctataaatagttcgacacgccactgttgagcactagatataggggtggggatgccgtattcttctagaggttcaagaaaacgatatcaatgtaatttcgtgtggcccacgtcgagtgcggccaaaatgcggaactcaggagagtgttcgccttataggaaaggggtgcccgatgggcgcacaggtgctggaggaaaccgtcaccgataacgagaccaaggtggccgccaaggcctccaccgtgctcgttgagaagcgtgatggtcgtgtggtcgacttcgaccccatcaacatcatctctgcggtcaagtctgctttcggcgacctgaacaaggaagtcggccccgaagaagatgccatgatccgtggtttcgccaaccaagtcgaaggcgaaatcaaggggcgttacaccggccccgccaaaatcgaggacatccagaatctcgtggagcacgccctcattgacgcccacctgtacgatgtggctcgcgcctacaccaattaccgtctcgacaaagacattcagcgtgccaaggccactgatgtcaacgaggccgttgctcgcttcattaatcatgacccgaccctgattcacgagaacgcgaacaaggattccaacgtctactccacccagcgtgatctgctggccggtgccgtgtccaaggccgccgcgttcaacatgctgccgccggcggtgtccaacgcccacatgaagggcgacattcacttccacgatgccgactattcgccgttcactgcccagtccaactgctccttgccgaacttctgggacatgttggccaatggcttcactcttggcaacgctccgatggcttccccgaagtccatcgccattgcggccacccagattacccagatcatgaaggacgtggcctccagccagtatggtggccagaccgccaaccgtgccgacgagcatcttgcccagtatgccaagaaggattacgagaagttccttgaggaagctcgtgagaccatccccgacggcatgccggttgaattcgcccgtcgtcaggtcgagagcgccaagaagaacgagcccgccaagctgcatttcggttcccgtgaaccgctgccgatggacaccccgttccacaccgacgttgacgaacttgagcaagagcgtgaaatcctcgccaagattcgtacccgcaaggccatctatgatgccatgcagaccatggaataccagatcaactccaaccgtgtgtccaacggccagaccccgttcgtgactgtcggctttggtctcggcaccgactggttctctcgtgaagtgcagcgcgcaatcctgctgaaccgtattcgcggcctcggcaaggaacaccacaccgccatcttcccgaagctcgtctttactgtgaagcacggcgtgaacgccgacccgggtgacccgaactacgatctgaagcagcttgccctcgagtccgccaccaagcgcatgtacccggatgtggtgttctacgagaacatcgtcaagatcacaggctccttcaaggctccgatgggttgccgctccttcctgcagggttggatcaacccggagaccggcaaggatgaagaagacggccgtatgaacctcggcgtggtcaccgtcaacgtgccgcgtatcgccatcgaatcccacggtgacaaggctcgcttctggaagctgttcgacgagcgtatggaagtcgcccatcaggccctccagttccgcatcatgcgctgcaaggaagccaccccggtcaacgccccgaccctgtttcgctttggtgcgtttggtcgtcttggtgccaacgacaacgtggaccagctgttcaagaacgagcgtgccaccgtgtcgctcggctacatcggccttgccgagaccactgcggtcttctatggcaagaactggattcgcgaccacggctgggatccggaaggcaaggagttcgcgctgtccatcgtcaagcgcatgaacgagctgtgcaagcagtggagcaaagcggagggttaccactattccgtgtactccactccggctgaatccctgaccgaccgcttcaaccgcatggaccgtgaaaagttcggccgtatcgaaggcgtgactgatcacgacttctacaccaactccttccactacccggtgtggttgcagcccactccgatggagaagctcagctacgagaaggacttcccgtactacgcttccggcggcttcatcaactactgcgagtacccgtgcctgcaggacaacccgaaggcgctcgaagccgtgtgggattacgcctacaacatcggcatcggctacctgggcaccaacaccccgatcgaccactgcttcgtgtgcggcttccagggcgacttcgagccgaccgaggaaggcttcaagtgcccggagtgcggtaactccaacccggacaagtgcaacgtcaccaagcgcacctgcggctatctcggcagcccggtccagcgcccgatggtgcacggccgtcacgaggaaattgcccaccgagtcaagcacatgagcggcgaaaccggtcgtgtgacgctggatgacggaaccactcgcgagtggttcgaagagaccaagtagggtttatacttgctcccgctgacgggagctgtagagcgtaagcgagactgagggcggtcatcctttatggtgttgaccaccctcagtccgtctgatgacggacagctcccgccagcgggagctaatgctttccgtaaggagggaatcatgccggagctgcatacgaccaagcccgaacccaagcgccatgactttgcggccggcgagaccgggcgtggcccctccgtaccctccaacggtcttgccaacgatccgaaagccggtcaatgggatggccggcgcatgtccaagcggatgatcgccgactacaaaaccttcattgtcaccgacggagaaggcgtgcgcaactccctttacgtctccggttgccccttccactgcgtcgactgcttcaacgcctccatctgggatttccaagccggccacgaatacacgcaaaaacttgaagacaaaatcatcgaagatctgaaagccccatgggtgcaaggcattacgttccttggcggcgagccattcctcaacactcccgtgctggtgccgctcgcacaacgtatccgccaggaattcggtcataccaaagatatctggtcgtggaccggctacacatgggaagaactcatgcgccccggagaaaccccagacaagcttgaattgctacatctcatcgacattctcgtcgacggccgctacctcagagaccagaaggactcgctgctgcaattccgcggctccagaaaccagcgcatcctcgatgtgcccaagtctctggaagccggcgaaccggtcatctgggccaagctccacgatcaagaacgagatatccccgaaatctatttgaaagaccgcgaagccggcgaaggccaacaggcctcgtagtagcagttctggaatgccgcactcagcaatatcgttggaactgttgggaaaaggccttcccgtgagcgaaatcgcctcgcctcgtgccatgttgggcaggtggtcggactaatattccataagaagtagccgggcgaagccgtccgcagggtatctgccagccgtcccgaaacggttcatgatgcctcaaagcgtgcactcccggaagtcggaattaagaggaacacatggttgacatcgccactgacgcgagcgtaaagcccgcttcacacccgaagcccctgcgtgtgggattggacatcggttccaccaccgtcaaggccgtggtgcttgatcagtccgattccctgggagacaccctcttctccgattaccgacgccaccacgccaacgtgcgtgccaccgtggccggcctgttggtcgacatccacaagaagcttgtggacctcggacgcggcgacgaaccgattcgcctgtctatcaccggttccggcggtctggcgcttgctgacaatctgcatgtgcctttcattcaggaggtcatcgccgaaaccgaggcaatcgacaaggaatacccgcaggccgatgtcatcatcgagctcggcggcgaggacgccaaaatcacctacctgaaacccacgcccgaacaacgcatgaacggttcgtgcgcaggtggtaccggcgcgttcattgaccagatgtccacgctgctcgacaccgacgccgccggcctcaacgagatggccaagagctacgagaacctgtatccaatcgcctcgcgttgtggtgtgttcgccaaaaccgatttgcagccgctcatcaatgatggtgccgccaagcccgatttggccgcctccatcttcaccgcagtggccacgcagaccatcgccggcctggcttccggacgcccgattcacggcaccgtcatcttcctcggcggcccgttgttcttcatgtccgagctgcgcgccgcattccagcgcgcgcttgagggcaaggtcgacgagttcatcgtgccgaccgacgcccacctgtatgtggcctacggttcggcattgcaggccgacacggattccgacgatcagggccaccatttcgaggcctacacctgcgacgaaatcctgaagcgtttggacgagctgaagaacctgccctccaacacgcccaccatgccgccgctgttccccaccgaggccgaccgcgaggacttcaacaagcgccaccacaaggaacacatccacatcggcaccctcgaaggcgcgcatggcccgcacttcctgggcatcgacgccggttccaccaccatcaaggccacgctcgtcaacgacgaccgtgaaatcgtctggtccagctacgccaacaacgaaggcagcccgctgaccgccgccatcaacatcgtcaagaagattcagtctgagctgcccgaaggcgcgtggatcgcacgctcctgcgccaccggatacggcgaaggcctcatcaccaccggcctgcacttggacgagggcgtggtggagaccatggcccactatcgtggcgccgaaatggtcagccccggcgtcaccgccgtcatcgacatcggcggccaggacatgaaatatctggccatcaccgacggcgtcatcgactcgatcgccgtcaacgaagcctgctcgtccggctgcggctcgttcctgcagaccttcgccatgtctatggggctgacgattcaggaattcacgcaaaaggctttggcatccacccatccggtggaccttggctcgcgttgcaccgtgttcatgaactcctcggtcaagcaggcgcagaaggaaggcgcgtccatcgaggacatcgccgcaggactgtgctactccgtggtgcgtaacgccttgtacaaggtcatcaagctgcgtgattccggcgaactcggcgacactgtggtggtccagggcggtacgttcctcaacgacgccgtgctgcgcgccttcgagctgctcaccgaacgtcaggtcacccgcccgaacatcgccggcctcatgggcgcgttcggcgccgccctgaccgcccgcatgcactatcaggatgaggccgaccacttggatgtggtggttaaggccgatgggtccgaggaacagtccgaggctgagcccgcactcaagtccgagcccaaggccgccgccttcaagaagacagagccggccaagcccgaagtccatgtcgttgtcgtggacggtgtgacccacaccgccagctccatcctgaccggcgacgcactcgacaatatgagcatgaccaccgagcgtgacgtgtgcaagctgtgccagaaccactgcaagctcaccatcaccacgttctctgatggttcgcgcttcgtgaccggtaaccgttgcgaacgcggtggtgacgccaagaagaagcgttccgaccgtccgaacctgtacgactacaagtacaagcgttgcttcgcctaccgccgtttgaccgacaagaaggccactcgtggcgagatcggcattccgcgcgccctcaacatgtacgagaactacccgttctggttcacgctgctcacctcgctgggcttcaaggtgatgatttccggccgtagctcccatgaactgttcgagaccggcatcgaatccatcgcttccgaaaacatctgctacccggccaagctggtccacggccatatcaagtggctgatcaacaagggcatcaagaccatcttctacccatgcgtgagctacgaggagaacctcgtgcccaacacggacaatcattacaactgcccggttgtggccaactatccgctcgtcgtcggcgccaacatgcctgagctgcgcgaggatgacgtgcgttacatgcacccgtacttcaaccttgccaaccatgagctcatggttgaccgcatcgtcgaagagtttgcgtgggccaacgtgacccgcgaagaggccgaaaccgcggtcaaggccgcctatgccgaagacaaggtcttcaagcatgacgtgcagcaggaaggtttgaccgcgctcgcctatatgaaagagcacaactgccgaggcatcgtgctcgccggccgtccctaccacatcgaccccgaaatcaaccacggcatccccgaaaccatctgctcgctcggcatggtggtactctccgaggattccatctgcgaactgcagccgggggagaagctcaacctcaccgaattcctttccgagggcgaagccgacccacgttccaagaacgccgccggattccgccatgtaggcgaccgcacggtcaccaagatgccgttgcgcgtcaccaaccagtgggcctaccactcccgcctgtacgctgccgcacacttcgtggcctcgtatccgggcctcgagcttgtgcagctcaattccttcggttgcggcctcgatgccatcaccactgatcaggtggccgagattctggccgacaaggcggacgtgtacacgctgctcaagatcgacgaggtctccaacctgggtgcagccaagattcgactgcgctcgctcaaggccgccgtcgaggaacgcgaggccaataaggctcgtgaagaagctgctgccaaggccttggaagacaagcaggccgccgccgaacgtgccgctgaggaggccaaggtcaaggccgagtccgatcttgaagcggccaaggccgtacttgctgaagcgcaggccgccgttgaagccgcgcagaagaaggtcgatgctgaggccaaggccgtgcaggacgccgccaagacggcacaatctgcacagtctgcgtccgtacagggtcccaagcccaccggcttccgcaggaccggttccaccgcgccgactccaggccgtcagattctgctcgatacgaccatggccgccaacccgaatctcaccaagtcgatgcgtgaggcctccaagcgtgccgccgaacgcgacctacaggccgcagtcgcccacaagaatggcacttcggacggcaccaccggcgtggcgaacgccaagaatgccaagaagtccggccacaacaacgccaccatgtcccgatacgcgcatcgtgagaagttcgtcaaggacatgaagaagaactatacgattgttggccctcagatgagcccgattcatatgtccttggtcgaagcggtgattcgttccggtgggtataagttcgacatcctgaagcacgcgagccgtggcgatgtggaaaccggcctcaaatacgtgaacaatgacgcctgctacccggccatcatggtcgtcggccagctcatcgacgcgattctggaaggcaaatacgatcccgaccatgtagcgctcgccatcacccagaccggcggcatgtgccgtgcgaccaactacttcggcctgatccgcaaggctttggtcgatgccggctatccgcagattccggtcatcgccatttctacccagggcctcgaagacaaccccggcttcaaggccaccccgcccctgctgcaccgtgccatcaaggcgctgattctgggcgacttgctcatgaagtgcctctaccgcgtacgcccgtatgaggtggagaaaggttcgtccaacaagctgtacgagctgtgggacaccatcgtgcgtgagaccatcgagcatcacggctattccaagaccgcagccaagacgccgagcatcaagaagggctatctgccgtataacgtgctggccaaggagatcgtgaaatcctttgatgcattgccgctgcgtgatattccgcgcaaggtgcgtgtcggcgtggtcggcgagattcttgtcaagtaccagccggatgcgaacaaccatgtggtcgacgtcatcgaatcccaggattgcgaggccgtagtgcccggcatcatggaattcatgaccacccgcccctacatcaccgactggaacgagaagaacctcggcatgggtggcaacaagacgctctacgccttgatgcgcaagggtcttgacctgtacaacgcgcctatcaaggccgcactggccacctcgcacggcaagttcaagcaggacgagccgatgcccgatcttgtcaagaaggctgctgaagtcacctccatcggtgtacaggccggcgagggctggctgctgactgctgagattctggagcttatcgaacagggttgcccgaatgtgatttgtgcgcagccgtttgcctgcctgcccaaccatgtgaccggccgtggcatgttcggcaagattcgtcgtctgcatccggaagccaacatcgtctccatcgattacgatccgggtgcttccgaggccaatcagctcaaccgtatcaagctgatgattgccgctgccaagaaggcccacaacgccaagttcgccgagaccggcgagccgcagggcttcacctccgcggactgaacgcacatacacttaagctcccctctatgagggggagctgtcgcgcagcgactgaggggagtctctagagcgagaaaccgggccggagcctgctatcggtttttcgtatagcgtattgcgggctttcgggcacgcgcgccggccggctcgaatacgatacaaagcatggttactccccgaatcagttacgcgcacctacttgccaagccgaaccccaagcatgtcgagagcctgctcaagttctttgagaacggtcgctcccagcgtggcaccggtggcttcggtgtggagatcgagcacctgcccgtgcacaacagcgacgacactgccgtaagctactatgagtcgaatggcatcgaggcattgctcaaacgcttggctccgtactacgacgaggagaaggaatactgggagaacggccatctggtgggtctcggccgttccggcgtcgccgtttctctcgagcccggcggacaggtggaaacctcaatcggcattttgaagaagccgagcgacctcaatacgctgtactccaagttccgtcgcgagctcgacccgattcttgacgatctcgacttccgcctggtcaactatggttaccagcccaaatccagctttgcggatgtgccggtcaaccccaaggatcgctacgatgcaatgaccgactacctcggccgcgtgggtcagtttggcccctgcatgatgcgttgctccgcctccactcaggtcagcattgattatgtggatgagcgcgactccatcgaaaagttgcgtctgggcacggttatcggtccgattctggcctacttcttccgtaacaccccgtattttgagggcgagacgaacccatggccgctgctgcgccagcgtatgtgggattatctggacttccagcgcaccaatgtgctgcccggcctgttcgatgatcgctatggttgggaggattacgccatcgacgtgctgtccacgccgcttatgttcgctgacctgacccatacccctgaagctgtggcttctggagcaagccccaaggaactgcatcgcccggcgttccgtgagaacgcgggggaggtgtacccagaccgcgaactcaacccgtacgagatcaaccacatcatctccacgcacttcaatgacgtacgtctgaagaacttcatcgaactgcgtcactgggattcactgccgattgagcgtgccgagcgtctgacggagattgtgtcctctctgttctacgtgcctgagcaccgtgaacgtctggaaagctacttcgagggcatcagcgaggaagaggtgttcgaggccaaggccaacattcaggcccacggtcgcgaggcttcgccatacggccagccgctcgatttctggaaggaattcttgggattggagggcctcttgtccgacattcccggcgatctgaagcaccccgacgtgttccaggagtaagcgaagaagcacatacagaaaaaactattgcgcgatatcggtgtcgaaggcatgacagaatgttttgttttggcaccgttttgcatatccggccaaggatattggatgtggttgcgcatgggagtggggagaatgcggatagactggcggatatgacagctgggaattcattgcagcataagcgtgttcgcaagtcgccgggggaacgccggcgggaaattctcgatgccgccgtgcgactgatttccgagcgtggctacaacggtacttctgtgcaggatgtggccgatgcggtcggtgttaccaagcagggagttttgcgatattttcctagcaaagataacctgcttgccgcggtgtatcacgagaattacaacacgtttggcagtgtggaagacttcatggcctccggcctgcctggttcagggcccgatgatttcagattgcccgcatatctgaggttcttggtacattgcaattccacgcgccccatgcttgttcagctgttctcgatattgcaggtcgaatcgttcaatcctgcgcatccgttacatgacgagtttgccaatcgtcgggattcaatatggcaatactattcgacatacaactggaacctgccttccgaattcacctcgtttgaggaggtccggcccacgttgcgccatgctctggagatcatggatggtgtgcaactgaggtggttacgggggccggccattgacttatgcgatgaatgggccgatctggagccggcgatatttccttcgccgatatgggacgggtgtcgctgattcgctgtgtgccttgaaccgaggcttgtgcttgatagcggcagtaagtatgcgggcgaacgaaggggtcgcatacatacggtcgttttggtgtatgtgatgcgcgcggcataagcgtgttgtatgctgtcaatagataaactaccaattggtaattaaaaaactgttcgatttcactgaggaaagcgacttcgtatgaccgacaacactacgcctgccgcaactgctgaaaccttaccgtacaagaatcctgatttgcccgctggtgagcgaatcgccgacttgctctctcgtatgacacttgaagagaaggtcggccagatgatgcagcttgacgcccgcggcggcgatcttgaggatctcatcgtgaataagcatgtcggatccattctgcataccagccccgaggatttatctcgtgccgccaagaccgtcaatgagaagacgcgtctgggcatcccgttgattatcggagatgactgcatccatggatactccttctggccgggcgccactattttcccgtcccagctcggcatggctgtcagctgggatccggacaaggtcaaggccgccggccgtgctaccgccgaggaggtctcttgtaccggtgtacattggacgttttctcctgtgttgtgcatcgcccgagatacccgttgggggcgtgtggatgagactttcggcgaagacccgatgttgatcggcgaactcgcctccgccatggtcaagggctatcaaggcggtgccaaggccggtgaggaactgccaaagaacgcaatcctggcctgcgccaaacatttcgccggctattccgaaacccaaggtggccgcgacgcctccgaagcggacctctcccaccgcaagctcgaatcctggttcctgccgccgttcgagcgcgtggccaaagaaggttgcggtacgttcatgctgggttacgagtccattgaaggcgtgccggtcacattcaacaaatggttgctgaccgacaagctgcgcggcgcatggaagtacaacggcacgctgatcaccgattgggacaacgtcggccgttcggtatgggagcagcacgtcaaacccgattacgtgcacgccgcggcagacgcggtcaaggccggcaacgacctggtcatgaccaccccgcagttctacgagggtgccatcgaggccgtgaagaccggccttctagacgaatcgctgatcgacgatgccgtttcgcgcatcctggccctgaagttccgcctcggcctgttcgaggacccgcgcctgccggacgccgaacgcatcaaggcggtcatcggttccgccgaacaccagcagaccaacctggaactcgcccgcgaatccgtcgccctgctgcgcaacgacggcaccctgccgttcgccgagaacacggccaagcgcatcgccgtggtaggtccgctcgctgacgacgcccagaaccagctcggcgactggaccggcaactccggtcaggtttcctggatgccggacggccagccgcgcgacatgatcgccaccgtgctcgacggcctgatccagctcgccgccgacgattgcgaggtcgtctactcgcgcggcgcgaacgtcatcgacctcgtgcccgaccccgcaggcgagttctacccggacggccagccccgcccgaagatcggcgtctccgccgccgtggaccaggccctgatcgacgaggccgtggccaacgcccgccagtccgatctgatcgtggccgtggtcggcgacgtggtccagctggtcggcgaaacctgctccaccgccacgctcgaactgctcggtggccagaacgccctgctcgacgagctctccgccgtctcgcgcgaaaccggcaagccgatggtcaccgtgctcatcagctccaagccgcaggtgttgcccgcctccatcgtgggcgagtccagtgtattcgccaagcgcgtcaacgaccccgaaaccggcaccggttctatcctgtgggcgccgaacccgggcatgcgcggcggccaggccatcgccgaaatcatctttggcctgaccaacccgtcgggccgactgccgatcaccttcccacgccacgcgggccagctgccggtctactacaaccagattcgcggccagcacggcgaccggtacgccgacctcacccaggatccggcgttcgcgttcggcgaaggcctgagctacacgacgttcgcatacggcgaaccgaccatcgtgggcggcgcaagcaatgccgacggcacctttgccgaaaccgacactgtacgcgccgaaatcaccctcaccaacaccggcgagcgcgccggcgtggagatcgtgcaggcctacatcggcgacatcgtgacctcctacagctggaccgaccgcgaattgaaggcgttccagcgcgtcgcactggagcccggcgagaccaagaccgtcgccttcgagatcccggtggcgaactgcacgatcgtggacccggacgccaaccgcatcgtcgagcccggcgaattcgaactgctcatcggccactcctcgcgccgtgaagacctgaagcgcaccactttcaccgtggcgtagatgagtcaggcaacggctcggtaatggcaaagcgggatgcggctcgatgtcgcatcccgcttttcggcttgttgcgctgttgcgttgccgccggccggcgtcaatcggacgtggtgatgtgctccacatcccagcgcacgccgagcacttcgggcgcgcaactggcgttcgagccctatcagtgcgcccaatgccgtgccaagcacgatgcgtacggtgcagtcgagaataacggccagagaaaacgtggtgaacatgaggattcacctcctgaaaaaaggcgtcaggaacttcccgcacaccctacagcgccagcccgcctcccgcaactgcgtcgccgcgttcgggtggttcgggctccgtgcggtgagcgggccgcggccgtatgatggaagcgcgggtagtccgggattttctgcatacggcgggaggcgtcatggttcctattgagaacgtgtacgaacagattcgtacgttcgccgctgatgccggcgctcgcaaggtcgtgctgttcggttctcgcgcaaagggtgtgaaccggcctaaaagcgatatcgatcttgccgtggccggttgccccgatttcaatcgcttggagcagaaccttcaggacaatctgtggtcactgcttaaagttgatgtcatcaatctggatgagccgatttcttcatcgctgagggcggagattgagcgtagcggaaaggtattgtatgaaaaaatatgagaattacgtttccgcactgaagtcgctgcgcaaggctcccgaacaggatctcagcaatgatttcatccagagcggcatcattgacaagttcgagttgcagtttgagcttggttggaaactgttcaagacgctgctggcttatgagggagaccctgtttctgcttccggttctccgcgagatgtgctcaaaaccgctttccaatattacgatttcatggacgaatcgttgtggctgcgtatgctgcgcgatcgcaatgattctgctcatatctacgatgaggaacgtgcccggcgtcttgtagatgccatcatcgttgattacatccccgaatttgagcgtgtgaatcaggggttggtcgttcgttacggcgaagcattgaacgattagcgcgggtgacattaatggcactgggcacgctgggcattggcgagcagatcaatggggtgaacctcggtaactggctggtactggaaaagtggatgaagccggggatttttgccgccagcggcgaagcggacgagatctggctgcatcggtctacggagtctgctgagttggaggctctgctgacgcggcatcgcgacacgtatatcactgaagctgattttcggaacattgccgcgcatggctgcaatctggtgcgtattcctgtgccgtattttatcttcggggatgtgtccggtcatccgggctgcatcgagtatttggacagggcgttcgactgggccgagcgtaccggtctcaagattcttatcgacctgcacacggtgcccggctcacagaatggattcgacaacggcggcctcaccggcgtggtgcgctggcatcatagcccgcgagcggtcgcctatgcgttgaatgtgctggcctgtctggctcgccggtatcgcgatcgcgcggcgctgttcggtatcgaggtgctgaatgagccgatcgattggttgacgtatgctacgtcgtcatcgagcaggcaggcaaaggatagctttgaagcacggaggagtgggccgattccaatggtgttcctcaagcgtttctaccgtgagtcgtatcgccggttgcgcccgattttggacgagaaccaagccatcgtgttccatgacggcttccgactgggccgttggcgggactggtttgtgcgggagggcatgcggggcgtcatgctcgatacgcatatctatctggtcatggccgagcattttccgctattccgtatgattccggagcgatggatgatgagctgttataggctattcgtgcgctggaatgaacgccgtatccgccgagcagcgcgctatacgccagtgatcgtgggggagtggtgtgtggccaacaatctggtaaatcggatgatcgctaagcattcgggcgatggcggtcgctccgaggaaaacgctatgcacagtgcatcaatcagaggctctatttaccgcgaggttgccgccatgcagcgcaaagcgtggagcgtatccgccgggcagatttattggagctaccaattacgtggtaatcgtgatttcttgcctaccatcgacccacaatccgacacgtcacgcctcgacccttgggatttcactcacgtctggcatgctggttggatggtgtaatgagaacgaaattgctctctggtggcatgattcgagccaattgtgtaaggtagagaatgagcttcgtgacccggcctatcctttgcggcggggtgggttgcgggttcgagatgagaagtcagctgccgctggcacttgattcgtccgcgcggatgaataccgcgaaagcagggtgcctagcccagtggctgggtgatacggttgggccaaccgaagccactaccgattccacttcgaaagtagtggatgatagtcatgcagaagactgtaaaacatggcttttcatctcaggagggacatctggctcagatgtccctcccttatttttcggcaaagggggagccgtgaatataacgaagacaaaggagtatgcattggcgcaagcccatgctgcggctctcctgtatcatgagcgacttgaaggccgttcaataaaaattcactgtgaagatgatctgactcttgccattgtttgggacgcgggaaatttcgctcatctatgtggcttggattattatctggatgattccaagcgatgtcgtcttcctcctagaaagctctatgaggatttgcttaggggacgcagaatctcacctaagcgagtgagtcctcatggtgatgtgcaatggttgaagaagaaggcagatgtcctgaccgatgccatggatatgtcaaaggtgacacatgtcgtagtgccgggcaatagcaggatcgtactgtacgcaggcaatgaggtctggtgcatcggtctcgggcgtatgcgtgatgggcggtattatccgcaaccgttggtaaagaaatctttcgatgaagtgcggaaaacgggtaccgtcacacatatcgtggccgcagtcgaaacgatggggctatagcccgaatgaaaggccggctcagcggtagccgttccagtgggggcgagggaacaggatgtcctcgtactgggaccagctggacatgaagtcgatgtctggctcgccaagccagcgggattgcaggccctccatggccgagccgacgcacatcgacagcaacccgatcttctgcggggtgttatattcgggcggcagcttccacggatagctgccgatctgcgcgcgcagccgtccgccacgctgggcgtagtactcgtgcgccgggtgattgggatcgatggcttcggcgcgcagcaccagatacagctgtgtgagttgcgggcgtttcatggtgtcctcggcgatggtccggtaatactcgggcatcagcagaggagaaagctcccgctgttcgggcgtaagcgcaagtttgctctgaatgtagtctccggcttcgctggaatcttcgtatcgacgcagcaccagcatcagcagcccgttcttgttcttgacgtatttgagtagcccggcctgcgtgatgccgacgcgatcggagacctcctggatggtcatgccgtaatagccgcgctcggccaccacttcggtggcggcatcggtgatcgccttgaggcgttcttctccgcgcgttcccatggcatgtctcctttcgtccggctttggatggtccgcgcccggcggcccaactgcgatatgagccatgatagccgtcatcccggcgtgtctcgcattgacacgctagaaagtaagtagtaacttacctaataacaaaagtaagtacttgcttacctttggttcgccggtcagattcaatgatggaaccgacccggcgcacgcaggaggaaacaacagcgaacatggaggttcgaatgtccacccaaaccaagtcgtccagccgcccctggctggtgttcatcggctgctgcgtattgtccctggtcggattcggcctgatcgtcaacacgcctggcctgtacttcaccgtcctcggcgagacactgaacgtctcgcgcacgcagatcgcattggcctcgtcgatcatggctatcgccggcgccgtgaccatgctgttcgcgggcaaggtcatgaagatgctcgattcacgcatcctgatcagcgtgtgcatcgcgggcgtcgccgccctgttcctcgcccagtccttcttcaacgcggtctggcagttctacatctcattcgcgctgatgggcattctctacgtcatcccgatttccctggcccccagcgtgctgctcgccaactggttcgaaagcaagctcggcatggtgatgggcatcgcccttggcctgtccggcatcggcggcaccatcttcaaccccgtcgtctcctggttcatcaccaatctcggatggcagacctcctaccgcctaaccgcactgatcctcgtcatctgcatcctgccgttctccctgctggtgttcaagttccgccccgacgaagccaagggcgagcaggcctacggccatatcgtctccgctgccgtcgccgatgacgcccaggccgccggcgagctgcccggcatcgaatccaagaaggcctaccgcaccccgacgttcgtgctgctggtgctcgtctccgtgctcctgcagattgtggccgcgctggtccagcacgtctccagccatgaaatcgcccatggcctgacgctggaacagggcgcactggtcgtctccggcatcatgttcggcgccgcgattggcaaggccaccatcggcatcctcctcgactatctcaagccggaactgaccatcgtcatctactccgcgatcggcctcgccggctggggtctcatggccgtcgccaccacgcccaccccggccatcgccgccggcttcatggccggactcggccaaggcgtcgtgctcgtcgccctgccgtgggtcatccgcaagtccttcggccagcgcgattacagcgagatcctgtccatcgtctccatgtttggcgcggtcgcctccgccatcgccgtcaccgcgcatggcgccgtgttcgacgccgccggctcctatgtgccgtcgctggtcggcaatatggccctgtacgtggtcgccgcggcctgcatggtcatcggattccgtatgcgcccgttcaaggaaatcacgaagcaggccaagtgaggccgggcaaaaccgattccagacaaacgtatatataaggaatataaggagtattcatgagtgacgcagacgacttcatgacccgatatctcaacaacatcaccagccagtacgaatcctcccgattcaagccggaatacgagccggccgagcccgaaacaaccaaggtcacctgccgcgacggcgtcgagctgacggtcgacatcttccgcccggccactcccggcccgtacccgaccatcgtggtgcgttgcccctacccgcagcaggtcgagctgtggaagctgcacggcgaacatctcaatcggcgcggctacgcgatggtgtgcgaatggtgccgcggcacctacacctccggcggcacgtgggaaccgaacgtcaacgagcgcaacgacggtgccgacctgctcgcctggtgcgaacatcaggactggatcgacgtgatcggcctgtggggcacctcgtacctgtccctgacctgctggaccgtggcggacatcaccacgccgaaggtggcctccatctgcgccaaccactacggcaccgaccggttcgcctccgcctaccaaaagggctccttccgctgcgacgtgctcaccgcctgggccatgcagaacgccggatatccggtcgacgccgattacatgaaatccgccctccacctgccgcagatgagcgtggacgaggacatgtggggcggccgccttgactggtatcgtgactggatcagccaccccaaggacgccgacgcctactgggatgagggattctggggactgctcaagtccatcccctccaaggtcaaggtgccgatgttcatccacgagggctggtttgaccaccacctcggcagcgccctaaccgggtacgccgcgctgaacgagcaggtcaaggaacactcctggctgcgcatcggctgctggaaccactacttcctcaatccgctggaaggactggaaccgaagcatctcgacgccgccgaagtgccggccgcgctcgaatggttcgacctgaccctgaagcggaagcagacccccatgcggcaggtcgagtactacgagatcggcagcgattcctggcatgtcgccgactcctggccgctgccgtccgcaggcgccgacgaagtcaggctctatctcaagtccggcgaactgacggccgaagctccgcaagccgcgagcgccgccgaatacgactatgatccggccaacccggtcatgacccgaggcggcgaggccctgctcaccacgatggacgagattggcgcacgcatccagccggaacccgggtggcgcgatgacgtcatcacgttcgaatccgagccgctggaccatgacctgcacatccaaggcgcgattagtgtggacctgtacgtctcatccagcgctccggacaccgccttcacggccaagctcatgtgcgtggacccggacggcaccgcgcgcaactaccgaacttccatcaccacgatcgggctggatacgccggacgccgcgccgtacaagccgggcgaaatccgccgcgtgagcatcgacatgtggggcatctgctggatggtgcccgccgggtcgcgcatccgctgcgatatctcatcttccgatttcccgcaatactccgtacacaccaaccacgctggactgtggagcgaacagaccggcacgcaggtggcccaccagaccattcacatgggcggcgccacgccgtccgccatcgtgctgccggtgcgtggctgagatacggtttcgataacgattgaaaggaacgacaatgatcagtcaggaagcgcgcgacctgttcgccgccaacgtgaaggccatgaccgccggggacgcggcgcatctcgcctcccagttgctgccggacgatgtgagccgattgaaggacatcgcttatgtgcatgatggcgacgccgcgcatctgctggacatctacactcccgcggatgcggaggaaggcgcggctctgcccgtcatcgtggacttccacggcggcggcctgtattacggcaacaaggagaacaacgaatgccgtgacatgttgctcgcccgccaagggttcgccgtggtgaacgccaactaccggctggtgccctcggtgagtttccccgcccagctggccgatgcgatggccgtgctcgattggattcgcgaccatggcgccgaatacggcctggacgccgagcgcgtctgcgtgaccggcgattcggccggcggcgccttggccctgtacctctgcgcggccaacggttcgacgcagctggccggcaccttgggcctgtggcagtccggcatcgaggtgcacgccctggtggtgacctccggcatgttccgtttgcagggcggcgtgcacgccaatgcgctgagctattacatggagggctacctgcagacgcccgccgaccacatcaaggtcaacccctatctcgatctggacaagctcatcgtggacggcgatgtgccgccgatctacatgatcaccagcgtggaggatttcatcgccgacaacacctacgaactggcacgcattctgcacgcccggcataaggaccatgcgatgagcgtatggcccaagggtcgcgagcgggtgctgggccatgtgttcaacatcgtccaggccggcgatcccgaagcgggcgaggcacatcaggtgatttgcgatatcgccgactactgcaagcgctatatctgatcgccgttcgtgcggccgaaccaacagtgggggtgttctatcagtgtggaacacccccactctgcgtggtgagaagcgttatgcgggatcacagccgcaactgcagccaaagtgctcagcgatacccgtcccacaggggcaggggcatcagcacgtcctcgcagtcggcccacatggcattgaggtcttgtcctggggcgcgcagccagcgcagctgaaggccgtccatcatcgagaatccggcctgcagcacatgttcgacattgacgccttccggcacggcccagttgatattgagcgccatggtgaccgtgcggcgctcgcggtcggtgaagtaatcgtgcgcgggatgggccgggtcaagtgcctcggtgctcagcgtggagaacatgtgcaccagcgcgggccgcttgttgttcaccgccaccacctgacgccacatgtccgcaatgagcgggcgctcctgggcgaccatcgcggcattgatcgactcggtgacccggtcgtattcctcggtcagcgccagatcgagcagtccctccttgctgcccacgtaatgcagcacgccggccttggtaagccccacttcggtggcgatgcgttgcagtgacgtgccgtaatagccgagcttgccgaacgattcgacggcggcgtcgagaatcgcggtgcggcgatcggtatcggtgggggaggggacgttcatacaggcaaccttacggtcggttagtagtggttccaaatgatttcggcgtgttgtgccggagattttgataatctacctaccaaccggttggtcgagagaaaacggcagtcgagattcgtggaggaacctcgaacaacagccaggcagcccggccgaatcggaaccaacgcatatcgaacaaccgcacaattcaagacagcagcgcaagccgcacaactcaagaaactcaaggaaagaggtaacatgagcgaggccatctacccgtccgtcaaggatctgaccctagaagagaaggcatccctcacctccggtggcgacgcatggcatctgcagggcgtggagtccaaaggcatcccaagttacatgatcactgacggtcctcacggtctgaggaagtccctggcctccagcaccggtgagaccgaccttgacgactccgtgcccgccacctgcttcccgccggccgccggcttgtccagctcttggaatcctgagctcattcacaaggttggtgaggcgatggctgaggagtgcattcaagaaaaggtggctgtgattcttggccccggcgtcaatatcaagcgcaacccgctcggcggtcgctgcttcgaatactggtccgaagacccgtacttggccggtcatgaagccatcggcattgttgaaggcgtgcagtccaagggcgtgggcacgtcgctcaagcacttcgccgccaacaatcaggaaaccgaccgactgcgcgtcgatgcccgcatcagcccgcgcgccctgcgcgagatctacctcccggccttcgaacacatcgtcaagaaggcccagccgtggaccatcatgtgctcctacaaccgcatcaacggcgtgcattccgcacaaaaccattggctgctgaccgacgtgctgcgcgacgaatggggcttcgagggcatcgtcatgtccgactggggcgccgatcatgaccgtggggcctccctgaatgcaggcctgaatctggaaatgccgccgagctacaccgacgaccagattgtctacgccgtccgcgacggccgaatcacccccgcccagctcgatcgtatggctcagggcatgattgacttggtaaacaagacccgcgctgcaatgagcatcgataattaccgtttcgatgtggacgcccacgatgaagtcgcccatcaggccgctattgaatccattgtgatgctcaagaacgatgatgcgattctgccgctgaacgccggtccagtcgccaatccgtccgccacgccccagaagatcgccgttatcggcgaattcgcccgcaccccgcgctaccagggcggcggctcctcccacatcacccccaccaagatgaccagcttcctcgacacgctcgccgagcgcggcatcaaggccgacttcgcccccggcttcacgctcgatctggaaccggccgacccggccctcgaatccgaagccgtcgaaaccgccaagaacgccgacgttgtcctcatgttcctgggcctgccggaagacgcggaatcagagggcttcgatcgcgaaaccctcgacatgcccgccaagcagatcgccctgctcgaacaggtcgccgccgcgaaccagaacgtcgtggtcgtgctgtccaacggctccgtggtctccgtggccccgtgggccaagaacgccaagggcatcctcgaatcctggttgctcggccagtccggtggcccggcgctcgccgatgtgatcttcggccaggtcagcccgtccggcaagctcgcccagtcgattccgctggacatcaacgatgacccgagcatgctgaactggccgggcgaggaaggccacgtcgactacggcgagggcgtgttcgtcggctaccgctactacgacacctacggcaaggttgtggactacccgttcggctacggcctgagctatgccacgttcgagatcgctgacgtcgccgttgccaagaccggcgcgaacaccgccaccgtgaccgccaccgtgaccaacacctccgatgtggatgcctccgaaaccgtgcaggtgtacgttgcaccgggcaaggctgacgtggctcgcccgaagcacgagcttaagggctttaccaaggtgttcctcaagtccggtgagtccaagaccgtgaccatcgaccttgatgagcgcgcgttcgcctactggtccgaaaagtataacgactggcatgtggagtctggcgaatatgccatcgaagtgggcgtgagctcccgcgacattgccgacaccgttgccgtggccctcgatggcgatggcaagacccagccgctcaccgaatggtccacctacggcgagtgggaggccgatccgttcggcgccaagatcgtggccgccgtggccgccgccggcgaggccggcgagctgccgaagcttccggataatgcgatgatgcgcatgttcctcaactccatgcccatcaactcgctgcccaccctgctgggcgaaggcggcaagaagatcgcccagttcatggttgacgagtacgccaagctgagcaagtaatactacgcaaactgccagctcccttttctgagattcagagaagggagccagtttgtgtatagggcatatgtgggattcgttgtctaggcaacacaccgattgttgtatatgcaactgttgtatatgggtctctttatcatgaattgttgcgtatgcaacaatgtggggtgaaggcgcatacgcgcatggcctcgcatggtacggaggacaatggatcagcatattctcagcattgagatgcgagcggtgaccaaagccgtcgaccgctatctcggtgagagcatgccgctttccgctaaggagaccactggcggcaacgcgcatatcatcatgttcctggctcgtaaccggaatcgtgaaatctaccagcacaccatcgaacagaagttctgtatcacccgctccaccgcttcgcgcgtgctggcgcttatggaaaagaaagggcttattgcccgcgaatcggtggcgcatgatgcccgttgcaagcgtatcgtcctgaccgataaggcggacgccatcgtcgccgatctcaaagcgaacggcgaacgcgtcgaacgtctgttggttgatggcttttccgaaagcgagaaagcagccctacgtgactacgtcagtcgcatgcgcgcgaacatcgaccgcgcacaacatgaatttgaacatcaaacactccctcagtcacctgtggtgatggctcccgatcaagacggagcggaggttgctaacacgaaggaggagaacgaatgagtgataccgcagaggcaatcgcgcaggcgcgcaaagccgtcgaaccggacaagcccaaacatgtactgcgcacgctgggccattcgattcgtgaatacaagaaagccagcatcctggctccggtgttcgtggcggtcgaaggtattctggaaatcctgattccgaccatcatggcttcgctgatcgatgagggtatcaccggtggcagcatgccggccaccgtcaagttcggcgtgattctgctggtgtgcgcgatggtttcgctgggtgccggcttcctgtccggaaagtacgcggccgtggccggcgcgggcttcgccaagaacctgcgcaaggaccagttcgagaaggtgcagggcttcagcttcaccaatattgaccggttctccaccggttcgatcgtgacccgactgaccaccgacgtgacgaacctgcagaacgcctacatgatgatcattcgtctgggcgtgcgtgccccgattatggtggtcgtatcctggctgttctcgttccgtatctccccgtcgatttccatggtgttcctggcctgcatcccgattctggccatcggcctgtgcggtctggccgtgctcgtgcatccggtgttcgagcgcgtgtttcacacctacgatgcgttgaacaacgtggtcgacgagaacctgcagggcatccgcgtggtcaagtcctataaccgcgaatccttcgaggtctccaagttcggccgcatctcccagcgcatcttcaaggacttcaccaaggccgaacgcatcatgagcttcaacagcccgctgatgatgatctgcatctacggttcgatgatcctcatcgcatggatgggagcacagcagatcgtcgcctccggcaacaaccccgccgtgggcctgaccaccggcgacctgaccgcactggtcacctacgccatgcagatccttatggccatgatgatgctgtccatgatcttcgtcatggtgattatttctcaggcttctgccgagcgtatctgccaggtgctgcaggaggaaagcacggtgcagaacccggcacagccggtgactgacatggccgacggctccatcgaattcgaccacgtcaccttccgctactccgacagttccgaaaagcccgtgcttgacgacatcaacctgaagatccgctccggcatgaccgtcggcatcgtcggcggtactggttcggcaaagtcgtctctggtacagctcgtgccgcgactgtacgacgtgagctccggttcgctgaaggtcggcggcgtggatgtacgcgactacgatctcgaggcgctgcgcgatcaggtggccatggtgttgcagaagaacgtgctgttctccggcactattgccgaaaacctcaggtggggcaacccgaacgccaccgatgaagagattcgccatgctgcgcagctcgcgcaggccgatggattcgttcaggaattccccgataagtacgacacgtacatcgagcagggcggtaccaatgtgtccggcggacagcgccagcgcctgtgcatcgcccgtgcgctgctgaagaagccgaagattctgattctcgacgattcgaccagcgccgtcgataccaagacggacaagctgatccgttccgcgttccacaacgagattccggacaccacgaagatcatcatcgcccagcgcgtggcctccgtgcaggaatccgacatgattctggtgatggattccggccgcatcatggcgtccggcacacacgacgaactgctcgccacctgcgatgaataccgttccatctacgaatcccagaccaagaaccaggcccagcccgaagaactggccgctgccgaacaggctgctgagtcatctaccgctgagccgtccgaaaccgtgacggtgacagtgaccatgcccacggccgataccagcgcagctgatgccaatgcagccgataccaaggaaggagaagcgcgatgagcaacgaccagagtttcaagaaccgcaagcccgccatgggcaaagccgagcctggcaccatcaagcgcatcttcagctacatcttccagtacaagtggcgtgtcatcgccatcgtggtgtgcatcttggtcggtgccgccgcgcaggccggttccgcgctgttcctccagtcgctcatcgacacgtacatcctgccgatggtgggggagtcgaactccgactgggccccgctgctgcgggccatcagcctgatggcgggcctgtatgtggccggcatcgtggcgtcctggctgtggcagtggctgatcgtcaccgtcgagcagggcacgctcaagaagattcgtgacgacatgttcgcccaccagcagaagctgccgatccgctacttcgacagccacgagcacggcgacatcatgagccactacaccaacgacaccgatacgctgcgccaggccatctcgcagtcgttcccgcagatgttctcctcgattatctccgcggtcgcggcgctgctgtccatgctgtggctgtccattccattcaccgcgttcgtaatcgtgttcaccgttctgctctacttcatcgtgcgcaagatcgtgagccgctccggccgctactttgtcaagcagcagcagtggatcggcgacgtgaacgccttcgtggaggaatccgtcaacggccagaaggtcatcaaggtcttcaaccatgaagacgccacccagaagaccttcgacgagaagaacgaggaactcttcgaggcgtccgccgaagcgaacacctggggcaacgtcaccatgccggtcgtcggcaacatgggctacctgctctacatcctgcttgccatcgtcggcgccgccgtctcgctggccggcgtcaacgacatcggtctgaccggcgtcaagccgctcaccctcggcacgctcgtctccctgctgaccctgtcccgctcgttcatcaacccgatcggtcaggtctctcagcagctgaccatggtgatgatggcgctcgccggtgcctcccgtatcttcaagctgatggatgagcccatcgaggaagacaagggcaccgtgacgctcgtgaacgtggaacttggcgaggatggccgcaccatgaccgaagtcgaccacgagaccggccactgggcatggaagcgcgaggtcggcgacgacggtacgaggtctctgaaggccgcagaaaagctcaagggctcggcccgcgaggtggcgatgaaggccaaggagcaggcgatcacctcgcccgacggccgactgaccctgctgcgcggcgacgtgcgtttcaccaacgtgactttcggctacaacccggacaagccggtgctgcacgacatcacctggttcgccaagcccggccagaagatcgcgctcgtcggcgccaccggtgccggcaagaccaccgtgaccaacctcatcaaccggttctacgacatccagcacggccagatcctgtacgacggcatctccgtggccggcatcaagaagcctgacctgcgcaggtctttgggcatcgtgctgcaggacgtgaacctgttcaccggcaccgtgatggacaacatccgttacggccgcctgaacgccaccgatgaggaatgcatcgaggccgcgcgtctggtcaatgcggacagcttcatccgtatgctgcccgagggatacaacacggtgctggaaggcgacggttccggcctgtcccagggccagcgccagctgatctccatcgctcgcgcggcggtggccgatccgcccgcgctgatccttgacgaggccacgtcctccatcgatacccgtaccgaggaggtcgtgcaggccggcatggataacctgatgaagggccgtacggtcttcgtcatcgcccaccgcctgtccaccgtgcgcaattccgatgtgatcatggtgctcgaccacggcaacatcatcgagcgtggttcgcatgacgagctgatcgcgcaaaagggcgagtactaccagctgtacaccggcgcggtggaactggagtagtgctttttggctcccctcagagaggggagctgtcagcgaagctgactgaggggagccgcagactagatgcggttccccttaattgtctgcggtggaaactgccttaagacagatacccgtgccgctactgttcgctgtgatggacgtaggcgtccagcgagagccggtcgataagcgagggtatgacgcctttgcgggtgattgagtacccggcggcataggtggcgatttcgaccgcctgccgcacggtgtatccgtacatcagatacgaggcgagcgcgctgatgaacgcgtcgccggctccggtgctgtctacgggggtgaagtcagcggccggatagtggcactcgacattctggccgcgcaggtagcagccgtgttctccttgggtgacgatgacgcagcccgcgccgcgttcgagaagatgcgcggccttatcctccattgtttttccctcagtttcgatgatcgccagttcgtgctcgttcggcacgagaatgtcggcattggcgacgatggagtcgggcagatagtcgcatgacgagggcttgataatggttttggcatggtgccgtcgggcggtgatcgcggtgactttggctgattccaacggtatttcggtctgtatcaggcagtatccggcattgtcgaacaggcgttcgttggaggtgatgtcatccggggtgagcgacgcgttggctccggagagaatcgcgatgaccgattcgccgttgggggcgaggaatatgaacgatgagccggtgtcctctccggcgcagcgtcgcacaccggccgtattgaccccatgctgttccatcgccttgaagatgtaatcggacccattgtcgacgccgacattgccgataagggtaacgcggtgcccgagcttggctgcgccgatcgcctgattgacccctttgcccccggggtatcgcgccgccgatttggtggataccgtacccccgatatgaggtagccgcggcactgacagatagtggtcaatattgatgctgccgacgaccaacacatgtttgatggcggaagtgggcggggctgcgatggtgctggtgttgtcgagatgaaaatcctgtacgaacgagggatgctgctctttgtcgtgctctatctgcgcaatgagcttctcgcagaggtaggcgccgaagtcggagttgcggatggtgtaggtagatatttccgtgttgccgggataggccagcgcttcggcggtgtcgtttttgatggagacaagtgaagcatcctctggaagccggtaatgcagggggctgatcatctgcgtgaactcgagtgctcgccggtaatgcgaggagacaaatccggtgatgtcccggcttccgattttgccgggcagcgagtcgttgaggtcgtagtagaccagatcgtcgctataaggcagctgatgatcgaacaggcaggagcgaaagccttcgagaaaatcctgcgtgcggcgtcccttggtcattaggcaggcgatgtgttggtgcccccgttcgatgagctcgctggtcagtttgtaggccgcttctttataaggcagtagcagtgactggtcgccgccgttgggtcctatggtcagcagtggggtgctttcggggaattgcgaggcataggcgaggctgtccggagtggccggttcccagatgacgccgtcgacgttgcggccgcatatcgctgcgatgtttttgagctcgcgttccggatcggaatagctgttgtaggcatcggttgcgtatccggcgttctgagcggcctggatgatgccgtccagcgtgctatcgaaggagatgggggagcgcagcagcactccgatggtgtagctacgcgtgcgctgtgaggcggaggcatatggcttgtaatgatattccttgacgatcgtcaggaccttcttgcgggtttcctcgctgatgctggaatccttgccgttgacgattttggagaccgtcgaggtggagacgcccgcgatgcgtgcgatgtccctgatgttcatgtctcccctcctgcctgttttcctctgtatcagtgtacaagggcgtagcgttctgttccttgctacgtcgccattgtgggccgttcggtccgggttgcttgaccctcgacccgccgtgttgacactgacgttggcgtcctataatcttatctcaagaaaacattttaggaaaatgatttcctaagattccgcaagacaaacaatgtagattgcacactgcggaaaaccgagggttggaaaataaaggagggccagcatggcaaggaagctgtcgttctgggaagggatcaaggcacaattctccacaaagtgcctggtgctgattccgatcgcggttggaatcaatctcattggcggaactctgtgctccgcactcaagctgccgctgttcctcgacatgatcggcaccatcgtcgtcgcatgcctgtctggaccatgggtcgcggccctgaccggcctgctgaccaatcttttcctggcactggtagccaacccggtctatcttccctatgcggcggtgtcggtattgtgcggtttggtcgtcggctatatggtcaaggccggactgttccacaagaagtggggcgtcgtggtcatctggctggtgtgcacgttcgtcaatgcgatctccgcatcgctgatcaccacattcgtatacggcggtgccaccggcgtcaacggtacatcggtgctgacggcaacgctggtcgtggccatgaaagacattctcgcctcggtgatctcctcgtcgctgatcgagaacctcctcgacaagggcatcactgtcgccatcgcgtgggtgatcgtgcagaagattccccgtcgctttctcagccagtatgcggccgactccatgggcggctcggacaatgatgcgctgagtgatgatgacgaagaagaagacgagtaagacatgtcgtcgcatatgccggtcatcaatgacaccgtaattgggaagctgaatccgatcaccaagatagcggccgtgttcgccttgggtctgtccgcattggcatggcctgacttcacgcttggtctgatactcgtggtgttgctgcttgtggtctcgttcttggctcatatacagcgtgatttcgccaagataatgttcggtttcggcatccccgtcactgtgatgctcatgttcatccaagggctgtacagtcccaagaaccgtaccgcattactggattttggcttcgcgcaactggggctcgaaggcgtgctgtatgcggccaaagtggtggtgagcctgctggtgtttcttggcagcttctacatcatgaacaaaaccacctatgtcggtgctatggtatccgcgctcacttcggtggggctcagcgccaaggtcggatacctggtgctcgccagcctgaatgtcgtgccgcagatgcaacgacgtatggcggtgattcaggaggcgcaatccgctcgcggactcgatgcatcgggtggggtcatcgcccgcatcaaggcgtatatcccgttgcttggtccggttgtcatgtcatcgctgaccgacgcccaggagcggggtatgaccctggagactcgcggcttcggcattactggagtgaagcagaccagttatgtcaaggtcagctggaatgccgccgacaaggtactcaattggatcttcgtcctgtttctgatcgccgtggtcgccgtttccgtatgcatccgcatcggtgtgattccgttgccggtctcgtggggaggcaagtgaatgagtccgatagtagaggtcaaggatttctccttcaagtaccgcgacaccaagcgtcgggccgtcaaacacgtggacttccaggtcgaggaaggcagcttcttcaccatcatcggcgcgaatggggcaggcaaatccacgttatgcaatgcgctcgtcggcctgatcccgcactatttcgtggggccgggggctggacacatcctaattgacgggaccgatgtcgccgattcgaccatcgccgaactgtcgaagaccatcggcctggtgtttcagaacccgttcaaccagctgtcctacaccgccgggaccgtcgccgaagagctggcctacggattaggcaaccacggtgtgcccagagcgcagatgatcgaccgcgtcgaagctgtggcgaaattgatgcgcatcgaccacattctagacaagaacccgctggaactgtcgggtggacaggtgcagcgtgtggctttcggatccactttcatcatggaaccgcgcattctggtgcttgacgagtgcaccacgcagctcgacccgatgggcagcgaggagattttcgacatcgtcaaacagctcaatgcggacggcgtcaccgtcatcatggtcgaccatgacatggagcgagtggcacgatacgcggataccgtcatggtgctcgagcgaggcgaagtcgtggcccttggctctccgatggaggtgttctccgatccggcgatcgaagagcatggcgtggaagtgcccgattacgtgaagatcacccgtgcgctcggtggcccgattgccattaccgaggagccggccatccgcatggccaaggaggcgctctcatgaaaatcgagttgcaggcactggagcacgcctatcccggaggggacaaggcccttgacggagtggacttgacacttgacggcaacgagccggtggcgatcatagggcagaacggtgcagggaagaccacgatggtcaagcatttcaacggcattctgcgccccaccggaggcaaagtgctgattgatggcattgacgtcaatgagcgcagcaccgccgaatggtctcgcagcgtgggctatgtctttcagaatcccgacgatcagctgtttctggaaagcgtccgcaaggaattcgaattcggtccgcgccagatcggcatgagcgatcaggacatcgcgcatcgcgtggacagcatcgccgagctggtaggtctcaccaaaaagctcgacgtgcacccattcgacctgacgcccaccgagaagaaattctgcacaatcggtgccgtcatcatgatggacccatccgtggtgattttcgacgagccaacgtgcggtcaggatgcgtcgggcaacgcccgccttgcacgcatcatcgaacgtctgaaagcacaaggcagactctgcatcacgatttcgcacgacatgaaattcgtcaccgcgaacttctcccgtgtcatcgtgatgtaccacggccgcgtgctgctcgatggccaggcccgcgaggtgtttgcccagaccgacacacttcggcgttccttcgtgacgccgccgcccgtcacccgagtggctcagggtgcaggcctcaaggagacggtattctccgtccccgcgttcatcaacgccattgctcaggaaaggaaccatcgtggctgatgtcattgctcaaatctatggaataaggaatgtcgaggacgctcgcatggtaatcgacatgggcggcgaacatatcggcgtctcctacggcaaaatcaagcggacgcccggtcagctcgattgcgaacgggccagggaaatcttcgaaggcgtgcaaccacaagccgtgcgcataggcctgaccgtcgccgaagacatcgacgaaatcagcgagaacctgcgcgaagccatgcccgacgtgttgcacctgtccggcgacatcgaaggcatcagtccggccgaagtggcggaacttaagagccggttccccgaactgaagatcatgcaggccatcccggtgctagccggagtgcctctcgacgaacagaaggtcatgcagtatgtgaaggactatgagccggtttccgacttcttcctcatcgacaccaaagcacctgctgccggagacatcggagcgaccggcctgacccatgaccgggccatcgaccgggccatcatcgaggccaccgacgtgccgtgcatcatcgccggcggtctggacgcctccaatgtggccgaggcgatttatgccacgcacccgtatggcgtcgactcgttctccctgaccaattacgacgatgatcgcgccgatacggatcggtgcaaggacccggccaaggtcgaggcttttatcaaggcggccaaagatgcctaaggtcgttgtcgtcggcgatgccaatgtggatatcatcgtgccctatccgcgttttctcaacgaggagcgcacgcaggtcgaatatccgcagatcggcatcgagggaggaggaacctcggcgaacacggccgtggcgttggcgaagctcggcctggatgtatcgttcgtgggcaccgtgggagatgatcagtacgggcgtttcgttatgcaggacttcaaggatgcgggcgtggacgtgaccgggctggttgcggattcgaccctgagcacggtcggcgtattcgctttcgtggacgaccgcggagagaggtacctgtggggatggcctcgcgaacggcaatcgttcaaggtgctcgacgaaaaccttgtgccgatgcacatgattcgtgaggcggattgggtccactcctcgggcatgtgcctgacctacgacaccagcgctagggagacgatcatccgcatcttcgaacaggcccacgatgccggagtccctacatctttcgacctgaacctgcgtgtggacgacggcgtgctcgaccccgatttcgcggctgcactcgaacgcattattccgaatgtcgattatctgctgggatcagggccggacgagttcgcctatttaggcgacgacgacatgatgggcaacgccacggcctatgcggtggacggccggaccgtcatcgtccgggacggcgcccgaggatcgatcggtcttacgcaagacggcctgacggaaagcccggcgttccgggtgaacgtcgaagacaccatcggagcgggggacgtctataacgccggtttcatcgctgccagactcgccggagcctccctcgccgaatcattgcgagagggcaatgccgtctccgcatacaaagtggcccgtcgcggggcacgttcctcgccggacgctgcacagctgcacgagttcctcgccgggcaaaccggctgaacgccatgcccgaatatcgaccaatccaaagaacacaaccaacggaggtatccctatggaaaacaagaagaaggtcatccttgactgcgatcccggacacgatgacgcgttcggcatcatgctcgccgtgcagcacctcgacgtgctgggtatcacgaccattggcggcaactgcacactggagaacgtgacccgcaatgccatcaaggtgcttgaggtccttggcgtggcggaccgcatcggcgtatatccggggcacagctgcccgatggtcgcaccgctggtcaccgcaccgcagttccacggcgagactggtctggacggtcccgtgctgccggagccgacgcacgccgcacagaacaagcatgcggtcgacttcatcgtcgacaccgtaatgagcacggatgacgtgacgctgatcgccaccggtccgctgaccaacatcgcctccgccatcaaccgtgagccgcgcatcgtggaacgggtcaaggagctgtgcatcatgggcgggtccgtcacctacggcaactggacccctgccgccgaattcaacatcttcgtcgaccccgaggcggcatcgcgcgtgttcaactccggtatgcacgtcaagatgactggcatcaacctgacccgtcaatgcgagctgaccgccaagcacgtagccaagttccgtgagatcggcaccaaggccgcgaacctggccgccgatctgaccgatttcttcatcggcgcatgcgaggaggagtccgagctgacgggcgccaccatgcacgacgcatgcgcggtggcatgggttatcgacccgtcgctgatcactgcggtcccgatgcatatcgatatcgagctgcacggcgcacttacccgcggtatgaccgtgtgcgactaccgtcatctgcgcggtaccgtgcctgccgtggatcttgaacgcacgccgacgatgggctatcgcggcgaagagccgaatgcggaagccgcgctggaactcgacttccccggattcgtcgacctactgaacagcaccctcgaaaactacgactgagtcttgcccctgaacaaccccctccaccgccggccggcgactccaaccccttctggccggccggcggtatctcgcctccaatcatcgaccaccgccatgcgaatgaacgaaaggagcaatccaatggagtaccgatgcctgttatgggatttcgatggcacccttgccgacactggcagcgacgtgtggaattccctgacgtacgccgcgcgtcgtgcgggcggggcgatcgatgacctgtacatgcgcgatgacgccaatctggccgatccgatggatgagatcatgcggcacgtgatcccctatcccggggaggcgtatctggagacatttgatgaggatgtacgcgtacactaccgcacgctcaatgatttttcgcgcaccagactctatccgggcattcagagcatgctgaatgagctgaagggacatagcgtacgcaatatcatcgtcaccaacaagccggagggcgcattgaggcgcatactcggcagcaaaggctgggcgaacctgttcgacgattggatctgccccgattccatacccggccgtgaggcgacgaaggtcgaaatgatagccgaaatcgttcgacggcatggcatcgcgccgagacaatgcctctatgtgggagacaccttcagcgacatcgaagctgcacggaccaacggcatctcctgcatagcggtcacatacggggatggcgacgaaatcgcgttgctcagcagaaaccccgcatatgtggcgcacgacatcgcggaactcaacgacatcatgacggacaccgtcatacacgcaaggagcatgatatgagggatttcaccatatgcatcggaaccaccttcgttttcgggcgcgacgccgaaaccaaagtgggagacgaactgggcgcaaagggcgtttcccgcgtgctcatccatcatgatggcggagcatatctggaaaccagcggcttgctagatgccgtgcgccgcagccttggacgggccggcatttcctatacggagcttggcggcgtgaagccgaatccccggctgacgctggtgcgtgaaggcatcgccatcgccaaagcccgcaatgtcgacgccgttgtggccatcggcggaggcagcgtcatcgattcggccaaggcaatcgcgctgggagccgccggagagcgtgacgtatgggattatttcaccggcaaagtgccggtaaatcgcacccttcccgtcgcggtggtactgacgtgcccggcatcgggcagcgaatccagccaggtcgccgtcatcaacaatgagcatgagcattccaagctcacgctgagcgaaccagtactccggccggcattcgcgttcatgaaccccgaactcagcgtcacggtgccggcgttccccactgcctgcggcattgtggacatgttctcccacatctgcgaacggtatttcagcgccgacaacgagatcggcgtaatcgaccgtatggccgaaggcgcattgcgcaccttggtcgatgtcggcccgaaatcgttggccgaccttgccgattacgacttgcgagcgcaaatcatgtggatctccaccatcgcgcagaacaacaccctcggcgtgggtcgtgaacaggactggtccacccacctgattgccaacgagctgagcgcgctatacgacacccctcacggggccaccctgtcaatcatcatgggatcttggatgcgcgtggccagcgagaaggccccgttccgtttcgcgcgatacgccactgaggtattcggcatcaggcccggctcgatgaacgaaaccgaactggcccggcgtggcatcgccgcaacggaatcgttcttccgctcgctaggcatgcctgtttccttcaaggacttcgatctgccgggcgacggcatcgaacgcatgttggacaacatcgatttctacgggccggacgccaccatcgggtccattgcccgccttgatcgcgacgattgccgtcgcatctacgaactggctgtcaccggtcccgtcatgggaaaggagtcctgatgcgcatactgaatttcggctcgctgaacatcgactatgtgtacggggtggatcattttgcggccaaaggccagaccatcacctcgcatgcgctcgacgtgttccccggaggcaagggactgaatcaatcgatcgcattggctcgtgccggcgccgatgtgcaccatgccggccaggtaggacgggacggcatgttcctgcgcgacctgctcgaatcctgcgcggtgggcgtgacctcggtggtagtgcgcgatgatgtgcgcagcggcaacgccatcatccaaaacgatgccagcggcgacaactgcattgtgctgtaccccggcgcgaaccgtgccatcgaccgtgatttcgtcgatcaggtgcttgacgggtatgggaagggcgattggctgctgctgcagaacgaaatcagcgaactgccctatatcgtgtcccgcgccaaggcccgcggcatgttcatcgtgctcaatccctcgccggctgactcgcggctcgacgaagtcgatcttgatgccatcggctgttttgtactcaatgagggcgaggcggcgatgctcacaggggccgaagaagatggggagacactgatccgtgcgatgcgtgcgcgtttctcccaggcggatatagccctcaccctcggcgagtgcggttcgatgtatttgcgtggggaccacgtcgtcacgcagtccgcttatctcgtcgacacggtcgacaccacggcggccggcgacaccttcactggttatctccttgccgacctgatgtccggcgaacccatcgcccatgcacttgatttcgccgcgaaggcctcggccctcgcggtatccagaaaaggcgcggcgccgtcgattcccatgcgagaggaggtagctgtttttactccttgcgctcgcgcataaggcattccaccaaactcaaaccaatagaaaggaatcaccatggcagaaaccgctgtcaaggagaaggcgaacggtatcccggtgcctgaggagggcaccgaagagtttgcccgtatgaacaagatggcaaagatcgccattccgatcgtactgatcatcttcaccatgggcgtgctgcagcagcaggctttcggcatgatctatgtgaacatcggcgaccagctcggccaggccaacctcgccccgttgatcacctcgattccgggcatcgtgctcggcatcgtgtgcgtgatctacggttctctcggtgacttcgtgtccctgaagaagatgatgattctcggcacgatcgtgttcgtgctcggttcgatcctcggctgcttcggcgacctgagcatctggatcgtcatcgccgcccgtaccgtgcagtccgcaggctggcaggtctccggctccatcttcctggtgctcgtctccaagtacatcgagaagaagaagcgagtcatctggtacggcgtgttcgtcgccgtgttccgtatcgccgcggctctgggcgtcttccttgccggctacatgacccttgtcgattggcgcatcctctttggtatcggcatcatcgcggtgttcttcatcccgatcctggccaagaacctgcctgacgagcatgccaagggcgcgcgcgtcgacgtgatcggcttcacgctcattggcctgttcgccggctcggtgaccatgttcttcaccgacatgaccatcttctggggtatcgcggtgctggtcaccggcgtggccttcgtggtctacatcaacaaggccgcggatccgttcatcaccccggagatgctcaccaacccggccttcgcgatgaccatgatcgtcatctttgtcggctacttcttcagctacaccctgaacgccggctgcaacgccatcggcctgaacgtgtacggcatcgactcctcccaggtctccaacctgctggtgtggtcgatcatcctcgccgccatcatgggcttcgccgctggcccgatcatccagaagatcggccgcaaggcctccatcattctggcgctcgcctgcatgggcggtggcctgatcgccgttgcgttcctgattccgatgggccagatctgggctcttgccgtggcgccgtgcatctactacttcggcacctcgttcttctaccagccgattgtggataccgcaacgctgaccgtggaggccgaggaatccggacgtgcattgggcttcaacgatctgatgcaggccatcaccggttcggtcggtgtcgcgatcttcggccagctcatggccaatggcgcgatgagcggcggctcactgttcggcaccgaatccggtccggcctcgacctatgccaacgtcttcatggtcggcggcatcatcgtcctgggtgcgatggttatcttcatctgctcgatgaagatgatctacagccgctcccgcgtcgccgaagacgagagctgacatcaggtcatatcgtctgctgatgtgacattgatatcgcaaagcccgtgaccggtgtattccggttgcgggctttgcgcgttacgctaagtagtaaagtaatttactgaagtactacgtaatgtttgcattgaggggatgatgtcatggtcacgatgaaggaaatcgcacagaaatcaggcttctcgcaggccacggtatcccggctgctcaatggggacccgacattgtctgtcaaagaggagacgcgacgtcgcatcatcgaggtcagcgagcagcttggctacgctaccggatcacgccgtatcgcattgccacgccgtgtggccgtactcgacaacgccacccgcgaggaagaactggcggacgcctatttcgatgaactgcggtccgtgcttggcgacaatgccagagcccagcacatggaactcacgtcgttttcccatatcgacgatctgattgccgacgccggtgatttcgacggcttcatctccatcggaccgtccgtactctcttcggatagactgtcgaagctccatctggtattgccctatggcgtattcatcgacatcaatcctgcgcccagcctgttcgattcggtacaaccggatttaagccaaaccattttggacgcattggatatgttggtgtcctcgggcaaacgacgcatcggctatatcggcggtactggcttcacgatgggtttgtacgaatatccggaagacggccgattaaccgcattccgcaattggaccgagcgtttggggctggatgcggaaggcctgatttacgcgcaaggcgcgttcactgtggacaccgggcgcactctaggggaggaagcggttaacgatcatcgagatgacatgccggatgcgttcatcgtggctgcggactcgattgcagtcggcgtactgcaggcgtttaccgctgcgggagtgctggtgcctcgcgataccagtgtgatcagtatcaataaccaggccatcgcccagtacacttcgccgacattgaccagttacgatatcgaccagaatgagctggccgatactgcgattacgatgcttgccgaggccatctccagtcggcgcacgctgcaccaccataccttcatctccaccaccctagtggtgcgtgacagtttcgtaccagcacgataaagaagctccctctgtgcgataaagaagctccctcgtcagggggagcttctttatcgctgttagaacagttccagattcacgtcgagcgtgtaggcgcgatcggcgggcagctggtactgctcatggacgggcgcgccccatgaatcgtcgccgcccacgcccatttgcgcggccaacaggcgcaggaacgtgtgacggaccggcggcaactcgttctggtgggtcgcctcttccagcatgagcgagctgtacggcaacaggctcgccgcgaaatgttcgctgccggcctggctgatacgcatgccgtgtccttgggcgtcaagcacttcggcccaacgcacgtcttcatggttgccggtctcctgcggcaccagatacggtgcattgttttcggccgcggtgcgctcgaaaatgccgagcttgccaccgtgcagacggtcgcgataggtctcctcggggccaaggccgtagaagcgcaggttctcgtactgcttgggaagtgtccattccaatccgaatgccggcagcgtcggcgcatcggtggcaccggcatatcgggcggtcagatgtacacgtccgctggcggcatccacctcatagcgcacggcaacttggcaacttgggtttcgcccggttcggccaacgtatgacgaatgccgccaacgggcaccaacctcgttgacggcattcgtctttccaggacaccgcaatcgcggatgcatgccgtttacgcgttgaatacgtattggtcaaggcggcgcatggcctccttgacgcggctcaagggcaatgcgagattgacgcggatgctgtagggggcctggaacatgtcgccgtcctgccatgcgacgcccacatcccagccgcgtttctccaactcgggcaggctcaggccgtggcgttcgcaccactgctcgcagtcgagcagcagcatgtaggtgccttccggtttggccagactcactccttggaaatgcttggtgatgtagtcgtaggcgtaatcgacgttgccggtgagcaccgccttcagttcgtcgagccactcatggccttcgggccggtaggcgccgatcagcgcgtgcatggaaagcacgttcatgtcgttgtagtggcatttcgagcttttggccacgatgcggtcccggagtgtgggattgtagatgatgtggtagcttcccaccagtccggcgagattgaaggtcttgctgggcgcgtagaacgccacggtcctgttgcgtgcgtcctcgctgaccgattgggtggggatgtgctggtggttccccagagtcaaatcggaccaaatctcgtcggaaatgaccacgcaatcgttggccttgtacacttccatggccttctcgatttcccaacgttcccacacgcgcccgcaaggattgtgagggctgcagaacacggccacgtggatgtgatgctccttgagcttcctgtccatatcctcgtaatccatgcgccatacgccgcgctcgtccagcgtgagcggactgtggacgatgcggtagccgttgttttcgatgctccgggtgaacccgatgtaggttgggctgtgcagcagcacgccgtcgccgggggcggcgaacgcggtcagcgcgctgatcacaccgcccaggaccccgttctcgtagccgatcgcctcccgggtcaatccggtgaccccgttgcgcgtggactgccagtcgatgatggagccgtaatagtcgtcggtgggggagaaatacccgtaggcgggatgcttcgcccgttcgatgatggcctgcgggatcgtgggcacggtcgggaagttcatgtccgccacccacatggggatgacgtcgaaaccctcgcgtggcgggtccggcgcgaatcccgggtcggtgcccagtccgtcgaccgcgatcgaatccatgccatgcctgttcatgatggacgtgaaatcatacgtcattgtccgacaatcctttctcggtccgtggtggccggtcccaatctaaatcgggctcctgacggtgccgtggccgtgggcggcgatttgaccgcgtggcgtgttaggatatgcaccgttgtgaggcagtgatccgttatcagcggggagtcttcggaagaacggcggcaatcgcccagtagaaccgacgggatcggcccgagacagccgaacacaagcggtcgcgcaggctcgcggctccgagtgcaacagttcggagcggcgcaaccggtgcgataagcgaggtggtaccgcggtgcggagcgcataccagcgctcgtcatcgtcctcgtaggcaggaacggcagacatggctgttccgggcggaacacagtcggttccggctgcgaggcgattgactaatcggcccacggttcggtacgtgacattcgtgaaaccagccggcacacgtcggcgcccggcaatcgccatcaatgacgctcctgtaggaccagtgcacagtactaacaggagatttacggtgagcgaaaacgtatatcccaaggcgagcgagggcggcgagaccgcgcacgtcgcgccgaaccccagcttccccgacatggaggagaccgttctcgactactgggacaaggacgacaccttccagcagtccgttgaacgcaacccttccggcgaccacagccagaacgaattcgtgttcttcgatggcccgccgttcgccaatggcctgccgcactacggccacctgctgaccggctacgccaaggacgtgatcccgcgctaccagaccatgaagggccgcaaggtcaaccgcgtgttcggctgggacacccacggcctgcccgccgagcttgaggcgcagaaggagctcggcatcgactcggtcgaccagatcgagaagatgggcatcgacaagttcaacgacgcctgccgcgcttctgtgctgaagtacaccaacgaatggcagaactacgtgcatcgtcaggcccgttgggtggacttcgagcacggctacaagaccctgaacatcccgtacatggaatccgtgatgtgggccttcaagcagctctacgacaagggcctggcctaccagggctaccgcgtgctgccgtactgcccgaaggaccgcacgccgttgagtgcgcacgagctgcgcatggacgccgacgtgtaccaggaccgccaggacaccaccgtatccgtggccgtcaagatgcgcgatgaggacgacgcctacgccgtcttctggaccaccaccccgtggaccgtgcccaccaacttcgccatcgtggtcggcgccgacatcgactacgtcgaggtccgcccgaccgaaggcaagttcgctggcaagaagttctacctcggcaaggatttgctgccgcattacgagaaggaactcggcgagaattacgaggtcgtgcgcgagctcaagggcaacgagctggaggggcgccgctactacccggtcttcccgtacttcgcgggtgacgaggccgaatccgaaggccacgtgcccggcccgaacggctacacgatcttcaccgccgactacgtcgacaccgtcgaaggtaccggcctggttcaccaggctccctacggtgaggacgatatgaatacgctgaacgcgcacggcatcaagagcaccgacgtgctcgacgatggctgccgcttcaccgcgcagtgccctgactacgagggcgatttcgtgttcgacgccaacctgccgatcctgcgcaacctgcgcgccggcgacggcccgctcgccgagattccggaagagcgccgcgcgatcctcttccaggagaagagctacgtgcactcctacccgcactgctggcgctgcgccaccccgctgatctacaagccggtctcctcctggttcgtgtccgtgaccaagatcaagccgcgtctactggaattgaaccagcagatcaactggatcccgggcaatgtcaaggacggtcagttcggcaagtggctcgccaacgcgcgcgactggtccatctcccgcaaccgcttctggggttccccgatcccggtgtgggtgagcgacgatccgaagtacccgcgtgtggacgtctacggttcgctcgaagagctcaaggccgacttcggcgactatccgcgcgacaaggacggcaacatcaacatgcaccgtccgtggattgacaacctggtccgcgtcaacccggacgacccgaccggcaagtcgcacatgcaccgtatttccgatgtgctcgactgctggttcgagtccggttccatgtcgttcgcgcagttccactacccgttcgagaacaaggagaagttcgaacagcacttcccggccgactacatcgtggaatacatcggccagacccgcggctggttctacctgctgcacgtcatggcgaccgccctgttcgaccgcccggcgttcaagaacgtgatctgccacggcatcgtgctcggctccgacggccagaagatgtccaagcacctgcgcaactacccggacgtgaacggcgtgtttgacaagtacggttccgacgccatgcgctggttccttatgtcttcgccgattctgcgcggcggcaacctgatcgtcaccgccgaaggcatccgcgacaccgtgcgccaggtcatgttgccggtgtggagctcctactacttcttcaccttgtacgccaacgcggccaacggcggggccggattcgacgcccgccagctgcgcgcggacgaggtcgccggtctgccggagatggaccgctacctgctggcccgtacccgccgcctggtgctggccgccgagaagtcgctgaacgagttcgcgatttccgacgcctgcgatgcggtctccgacttcatcgacgtgctcaccaactggtacatccgcaacacccgtgaccgcttctggaacgaggatgcgtccgcgttcaacacgctgtacaccgtgcttgaagcgttcatgcgcgtgcttgcgccgctggccccgatggaagccgagtccgtgtggcgcggcctgaccggcggcgagtccgtgcacctggccgattggccgttcgtggtggacgagaagaccggtgaagacaccgaactcggctgcgtgctggtcgacgacccggctctggtggatgcgatggagaaggtgcgcgaggttgtttccggcaccctgtccctgcgcaaggccgccaagatccgcgtgcgccagccgctttccaagctcaccgtggtggtcgagaacgtggacgccgtcaagtcatacgacgagttgctgaagtctgaattaaacattaagaatattgagttctcgactctggaagacgccgccgcccacggtctgaagatcgtgcacgagctgcgtgtgaacgctcgcgttgcgggcccgcgcctcggcaagcaggtgcagttcgccatcaaggcctccaagtccggcgattggcatgttgatgccgcgtccggtgcaccggtggtctcgacgccgtccggcgaccttgcgctggtcgaaggcgagtacgagctgatcaaccgtgtggaggaggagaacgccaccgtggccgccgcttcggtctccgccgctctgccgaccggtggcttcgtgatcctcgacaccgcgctggatgacgacctgctggctgaaggctacgcccgcgacgtaattcgttctgtgcaggacgcacgtaaggctgccgatctggacatcgcggaccgtatcgccctggtgctgaccgtgccggccgccaatgtggccaaggtcgagcagttcaaggatctgatcgcccgtgagacgctggctacctccttcgaagtgaaggaaggcgccgagctggccgctgaggtcgccaaggcgtgaggctgatgctgagctaaggctcttcaattggtctgaaacaattgcgggcatccgatatacagtgattcaatgaacactgcatatcggatgcccgcatttttcgtgcgtttatgcgtcttttcgacgcatccctattttgaaaaaatctaacttattcaagtttttcaaaatagaagggaacggttatacctctcatggcttgtaaggtgtcgctccaatcgtcgttagctacacttatcgcgataagtgtggctaacagcggaaatggtagtgtccaagtcgccggtagatgtattgcgtatgttcggccagccactcgtatcccgtctaccctgcttcatctagtgccgatgcccgcttgggaacagcgtaagttggagaatctagcttcctttggcggcggtcatactcctcctatggctgatgccggtaattatgtcgatgggaaaatcttgtggattacttcacaagatgtgaagcaacattatattgaaaacaccacgacgatgattagcgaaaagggtgcagcaacattgacgctttacccctcagactcgatagtcatagtcgctcgaagcggaatacttaggcatacgattcccgttgcaaagctgcggaaaccagccaccgtcaaccaagatattaaagttattcagactgtcgattcttgtgattcctcatggcttttacagtatttcattgcctctaacaagacgctgcttcgcgaatatggcaagacgggaaccaccgttgagagtatcgactttgcaaagatgaaatcgacggctctgatggtgccgtacattgaagagcagcaggccatcggctccttcttttcccgtcttgacgacctcatcacccttcatcagcgtaagcgtctgtggtttgctaaataagggtggatagggctctcatcacgatgtcaacgtctttgttctccaattcacggatgacatgcagatatgtttcctgcgttgtgttcatgcttgcatgccccagtctcttggacacgctcgcaattgaaacgccagcaaacagcagcaatgaggcatgggtatgtctcaagccgtgaatcgagatcacgggtactccggcttgtttgcaatgccgggccagaataccgtttgcggtcgagttgtacaccttaccgttcacgaagataggcttgtcgtcaggcaagttcttcagcaggacggacaattgcatgatgagttgccaatcaagttgtactttacgcaccgaagaagcattttttgttggaacaaagccacctccgttcttgtaattccaagtcttattgacagacaaagtctggtggacgaaatcaaagtcatcaggagtaagacccaatgcttcggagaaacgtaaaccggtttttgccaccagcaatatcagccagtcccagttaggtatcgggtcaagcttcaagtcagcaaggacagcatgaagttcgaattggttaagatatttcgtcttcttttgtctcggctgcttccctttgatgattgcttttcgagtgggatctctttgaattaggccctcatcaacagcatcaagaatggcccctttcagttggtgatgaaaatccatcgttgtttgatgttcatgatgttcggcgtatccattgatgagtttctgataactcacacgatcgaactcagaaagcttaagatcagggataagctttctcagccacgcctgtgtgagtttgtatttcttcatcgtcacctcccgaatcgcgccttccttgtagacgtcgacccattgcgagtagtaatcgcagaatgacatttcttcgtttattgtgtttatgaccacacggggctcctttgccgaatagatagacgcttacgctgatgaagggtgatgaggtcgtcgagagatcgcagtgtcatcccgatttgctgctgttccgtttttgaaggaagcatcaattgataatctgcgtattcctgcgcattgacaccaggctgcccggaccgctgcgaggttatggcaacatacttcttgtatgcatcggtcaaggttgcctgataggcgaattcggggtcagcgccttcgccgattcgggcacggataaggaatccagcaaagtagaccattccatcgaattgcctgtacagatatgtttttcctacactcgcgcctgtgcgagcaaagagcagatcgccctctttcagtaaataatctgcactcattgcaaggtcagctaacggcgtcgtaagatcgcttttcgagaactcatgggtttcgtcatcaatgtcggtgatacgcagatatttattttggccatcgtattctgttgcagcagcgttcaagccgtaatcaaatgaagacgcaacgtctcccaacttacgctgttcccaagcgggtgtagaattattgcatttgtattgcagtttgaaagtgtagaatgcaatgacgtactccgatctgattgagcatgatgctggtgaaacagagatacgttcgtatctggtaaacggtgatgtggtgccggttactatgcgtatccccgctaatttgcgagattctgctaaagaggccgcatctcttcgcgggatgagcttttcggcattcgtgagaacatgcatgattaatgaactagcaaagggcggcaagtaatgattgctctcactgctatgaccatacaaattattgacaacaatcctgatggcattcgaatttgtcgtgtggatggggagtcgcttgtcacggttgtggtgccccgggatatgttgagtgaggcgaaaagtcttcccgatttgccggatcgcggtgtgtattatcttcttgatgaagatcatggagttctgagccgtgcgtatgtggggcaaaccacgaaggggcttagtcggcttgatgcgcacaagactaagaaagatttttggaacaaagccatcatgttcctcgataatgatgtcaatatcgatcgtgatgttttggactctcttgagtcaacagccatagattatgtggacaaacatggctcttatgagaccgacaatgagtatactcctgctcctcgcatgaatccatacaaagagcaacaggtggaaagactgcacaataacatcctctttcgtatgcgagtgctcggatatgaccttgatcgaaaagaaaagacaccggttatggtgaacgccgtattccatacgaagaagaacggtgttcaggccactgggcgatatagtcaaggtacaggtcgtttcactgttctttccggttctgaagtggatctcgtacatccagttattaaaaaccagggagccgtggcagctcggcagcatcttttcggaacgcagacgggcaaggcgactcttgctgatgacattgaactgtcaagcccttccgctgctgctgtatttgttctcggtggcagtcaaaacggttggaccgaatgggtcaatgaacaaggacagacccttgattacgtgtacagaaacaaggagcatatgaatgaataagcagcagcttgccgccaaaatctgggaatccgccaataaaatgcgttccaagattgaggcgaatgaatacaaggactatatcctcggctttatcttctataagttcctctcggagacggagattgctcgtctgcgtgctgaagactggggagccgaagacctcaagggcttggatgagaatgatgccgaaactgtacagtatgtacgtgatctgtgcggctactttatctcctacgacaacctgttctccacatggattgccagccaaagcgatttcaccatcgccgacgtacgtgatgcgctttccgcttttgaacgcaacatcgatccagcccgcaagcgtgtgttcgccggcatcttcgacacgttgcagactggtctatccaaactcggtaccgatgagaaaagccgtagcaaggccgctcgcgacctcatctacctcatcaaggacattccgatggacagccggcaggattacgataccctcggcttcatttacgaatatctgattagcaacttcgcttccaatgcgggtaagaaggccggtgagttctacacgccgagcgaagtttctcagctcatgagcgaaatagtggcctggcatcttgctggtcgtgaagaaatcaacatttatgaccccacaagtggctcgggctcgttgttgattcatattggtcaagctgtggcccgccgcaatggcaatccgaatgacatcaaatattatgcgcaggaactcaaggagaatacctacaacctcacacgcatgaacctcgtcatgcgcggtatactgccggacaatatcgtgacccgcaacggtgacacattaaagagcgactggccgtggttcgataccgacgagaccaaggacgagacctatgagccgctgtttgtagatgccgtggtttcgaatcctccttactcccagaactgggagccgccggaaccgggtgaagatatccgcttcgaatatggcatcgctcccaagtccaaggctgattatgccttcttgctgcacgatctctaccatctgcgcgacgacggcattatgaccatcgtgttgccgcacggcgtgctgttccgtggtggtgaagagggcactattcgccggaatctagtggagaaccaccatattcaggccatcatcggactgccagcgaacatcttctttggcacgggcattcccactatcgtgatggtgctgcgcaagcaccgcaacgatgaccatgtgcttgttgtggatgcctccaagtatttcgctaaggacggtaagaacaacaagctgcgtgcgagcgatatcaaacgcatcgtggatgcggtgtcggagaatcgtgatgtcgataagttcagtcgtttggtcagcattgacgagattcggcagaacgattacaacctcaacattcctcgatatgtggattcctccgaaaccgccgaaagttgggacgtgtattccactatgtttggcggtatccccaagcaggacatcgatgcgctcaacaagtattggaatgtgtttccgggattgcgccaacgtctcttcgcggaggagaatggtcattcggctaagctcgctgtgcaagatgttcgtgaggcggtgaatgctgattctggtgtgagtgcctatatccagcgttatcgtgaggttttcaccgattatccctcatatctacgtggcgaactggtcggtaatgccgtcaacgtgagcattgccgccgaggaggaagttctggcaaatgacctgctgcatcgtttggccgacgtaccactcgtagatgcctatacggcatatcaggtgcttgatgacagctggcagaagaccatcgccaacgaccttgagaccatacagagcgagggacatgacgccgttcgcaaagttgatgccaacatggtcgtcaagaagaaaggcggcaaggatgtcgaagtgccggacggctgggccggacatattctgccgttcgaccttgtacaagaaaaactgctgagtgctgaccttgcagaaatcggcacatatgaatcccgattgactgagattagcagcgagatcgctgacattcttgaaaatctggatgaagacgacaagaattcgaccgatgctgtcagtgaggatggagattctttcgttgccactgagttgaagaaagcggtgaaatcgattgggaaggatcctgagactgattttgaccgtgcccttgtgaatgcgcaacggttgtttgatgaggagcgtgaagtcaaaaagaacgttaagaatctccgctcagcgcttgatgagaagactcggaccgttattgaaggactgagcggtgaacaagctgctgacttgcttgctgccaagtgggtggaaccattgcagcgcaagcttgaggagcttcctcagacggctgttgatgagttgattgcatcggtgaatgcgctgaacgacaaatattcgactacctactccgatgtatgcgagcaaatcgagcaagctgaggcagaacttggcaatatgcttgatcagctaactggcaatgagttcgacatggctggtattgcggagctgaagaccctgttgggaggcaaatgatgactgaacaggcgaaagttcctgcgattcgttttgctggttttactgacccttgggaacagcgtaagttgggtgagctgtcctccgagtttcaaagtggcgacttcatttctgccgaagaaatacttggatctggaccataccccgtgtatgggggcaacggtttacgcggatacgcaaaacaatacaaccatgacggtttttatgcccttataggtcgtcaaggtgcgttatgcgggaatgtcaatactgcagtgggaaaggcctatttcactgaacacgcggtagctgtcaaggcaaatttcctgcatgatacgcgctttctggctcatcttctggggtgtatggacttaggacgatattcgggccaatctgctcagccgggtttagccgtgggagtgctcaaggaagttgagacaacagtaccttcaaaggccgaacagcaggctatcggttccttcttctcccgacttgactccctcatcacccttcatcagcgtaagtatgacaagctcgtcatcttcaaaaaatcgatgcttgaaaaaatgttcccgaaggatggcgaatctgtacccgaaattcgctttgctggttttactgacccttgggaacagcgtaagttgggcgaattgtttgattacgaacagcctcagccatatattgtgaggggaactgagtatgacgattccttccccacaccagttttgactgccggtcaaagtttcgttctgggatacacaaatgagaagcaggggattaagatggcgagccctgagcatcccgttatcatttttgatgattttacgacttcgagccattttgttgatttcccctttaaagtcaagagttctgctatgaaactgctgactcttcgcgacaaaaacgaagacattcattttgcataccaggtactgcaaaatattgcctacacgcctgtgagccatgagaggcactggatttctaaattcgcgactttcgcaactctcatgccggagtgtaaatccgagatgcaggcaatcgggcatttcatgtcaaaccttgatggcctcatcacccttcatcagcgtaagttggaattgctgcaggatatcaagaaatctttgcttgacaagatgtttgtgtgaggggaggagccgcaatggaaacgttcgatatcgtaaagctcgcctcatatcgcgagaataatcggattgaggcgaaagccgcgaaaggtggtctcccgcgcagtatgtgggagacctattccgccttcgccaacacctatggcggcgtcattctgctcggcgtcaaggaacgtgaagacggtaccttcgaaacagtcgggcttacgccagccgaggtggagcaccttcatcaggatttttggaatacggtcagcaatcgatccaaggtaagcgccgtgctgcccatcgaatcggaagtcgaagtgcttgaagcggatgatggcatggtggtggctattcatgttccacgtgctccacgcgacgaacgtcccgtgcatatcaacgacaatctctttgagggaacctaccgccggcgcggtgaaggtgactatcgttgcacgcggcaggagatttcggcaatgctccgagatcagggaaccgagacgatggattccaaggtgctggacgatctcactgttgccgatttcaatgcggatacggtgcgggcgtatcgcacccgtttccgtgcggcacgtcagggcagttcctggactgatcttgatgacgagcgtttcctgcgtgcggttggtgcggcaatggtgagccgtgaagatggtaagctccatcccacattcggcggtttgctcatgttcggcaacgactatgacatcgtgcgcgaatgtccccattactttcttgactatcaggagaccctagacccggcgattcgttggaccgatcgtgttcattccggcgatggcatgtggtcgggcaacctctttgatttctttttccgtgtgaatcgtaagcttgccgagtctctgaagacccccttcaaacttaacggtatctttcgtgttgacgacactcccatgcataaggcggttcgcgaggcgctggccaactgcttgttcaacgccgattattatggcgtgcgtggagtggtggtcagacgcacacccgataaattggttttcgagaatcctggtgatatccgaacgggcgttgagcaaatgcgccttggcggagtatctgatccgcgcaacggactgattatgaagatgttcagcctcatcgatgtgggggagcgagccggtactggtgttcctgatgtgtttgccacatgggcgaatgcaggacttcccgaaccacggattgaggaaaaattcggcgaggctgatcgtacgatactcacgcttatgctggaatcggatgccaagtccgctcacaatgagcagataattgacaataatgagcagttaaacggtccaagtgagcagataactgacaataatgagcagttaaacggtccaagtgagcagataaccgagagacagcgaactgttcttcgtttcgtggaaaggaatcccagtacaacatacgaggatatggctcgtgctgcgggagtttcatcagcgactgtgcgaagagatgctgaaatactcattgggcgtggattactcaagcgcgtcggctcgcgaaaagcaggacactgggaagtccgagggagagaagaatcgtgatattcgatagcgaatcggtgttcgaggacaacgtcattaccgtgcttaagcagcatggatggaaggatggcgtcttgcgctatccaaccgaacaggatctgctcgacaattggaaaggcatcctgtaccgcaacaacaacgacatagacaggcttggcaaatacccgctgacagacggggaaatggcacagataatcgagcagattgagaccctacgaaccccgcttgcgctcaattcgttcgtcaatgggcgtaccgtgtccatcacgcgtgacaacaaagaagatgtggcgcatttcggcaaggaaatcagcctctacatctatgaccgcaaggaaatcgcaggcggcaaaagcacctatcagattgctcagcaaccggtctatcccgccaagaacaagatgttgaactcgcggcgcggcgacctcgtgcttctcatcaatggcatgccattgattcatatcgagcttaagaaaagtggcataccggtcagccaagcaaccaatcagattgaaaagtacacacacgaaggcgtattcaccggcctgttccgactcgtacagatttttgtagccatgaaccccgatgacgccgtctacttcgccaatccgggcgtagacaaattcaatccaagctattacttccattgggctgactacaacaacgagcctatctgcggcgggcaaaaccccggcaaagacgaatggaagctgttcatcggcggtacttccggcactgcggggctgttgtccattcccatggcgcatcagctcatcggcttctacaccatcgccgactcggcagacggatgcctcaaggtgctgcgcagctaccagtacatcgctgcgaacgccatctctgacgtggtgcgcaaatgcgattgggaacagcggccaactactccgggacgaccaggcggctatgtatggcacactaccggttccggaaaaaccatgaccagcttcaaatcggcacaactcatagctgattcgcatgacgccgataaagtcgtgttccttatggaccgcatcgagctaggcacccaatcactgaaggaataccgcagttttgctgacagtgagacggaagtacaaggtactgagaacaccggcgttttgcgggacaaactcaacagcaccaatgtcaacgacaccctgatcgtcacctcaatccagaagatgagcaacgtgaaagcaggggagcggggcgtcacccaggcgtggctggatcagctggctgcacgacgtatcgtttttattgtggacgaatgccatcgttccacattcggcgacatgttgcaggacatccgtcgttccttcccgaatgcgctgttcttcggcttcaccggcacacccattctggatgagaaccaaaagaagaattccaccactgccatggtattcggccgctgtttgcaccgatacagcattgccgacggcattcgcgaccataatgtgctcgggttcgacccgtacatggtgaccacgtacaaggattctgaagtcagacgtgccgtggctctcgacaaggcgaaggcggagagtgcggaagatgcgctcgccgactcggtcaaggccaaagtattccagcattacatggataagtctgaggtccccatgggtccgatggttgatggtgccgggaaccgcatcagtggcatcgaggatttcctgggacgagaccaatatggtatcgactctccgcacccgagtatggtggtctcggacattcttgaacagttcccggtgctcagccatgcgggcaaattccatgcgatgctcgctgccagttccattcctgaagctgtcaactattatcacttgttcaagcagcaggcacccaagttgcatgtgacggcgttgttcgatcccaatatcgacaacaacgaaggagcgacagacaaagaggatgcgctgaccgaaatcatcaccgattacaacgaggcgttcggcaaagaattcgtcattcctacatggccggcgatgaagaaggatatttcttcgcgactgtcgcacaagagtccgtatggtggtatagcaacgaaccgcagccagcagcttgatttgctcattgtcgtagaccagatgctcactgggttcgactcgaaatgggtgaatacgctgtatctcgataagattatcgactacgaaagcatcattcaggcgttcagtcgtacgaatcgtctgtttggcccagataagccgtttggcgtcatccgctattaccgtaagccgtacaccatgcatggtttcatcgaggcagctgtgaaactgtattcgggtgatcgaccgctcgacctgttcgtacagaaattgccagcgaatgtgaaatccatggatactcggtaccgtgagattctcgacgtattctcagacagcggagaatcggaccttatgcagctgccggagtcggtagaggctagacgtaagtttgccaaggagttcgtggaactgaatcggtaccttgaagcggcgaaagtgcagggctttgactggagcaccacggaatacaaggtcgatagcacggatactgacgatacgaatgaggacaatgatgagcatggcgagtctgaagtggtgcgtcctcaaattgacgaacgtacgtacctcattcttgcgcaacgctataaagaactgttcgatggcaatagcgatcgcggtagtgacccagatgatgatgtgaacgataatcctgaagcgccatatgaactggatggttacctcaccgaaattgataccggactcatcgataccgattacatgaatgccaacttcgataaatggctgaaggcgctcaaggagaatagcccggagttggcagagatgtctgcgcagctgcaccggtcctttgccgcgctctcgcgggatgaacaacgactcgctgaactgttcctgcatgacgtggagcgtggcgacgtggaggtcgaagccggtatgacgctacgtgattacatcacgcgctatgctgcacgcgagaagaatgagcaagtcgacaaactggtcgatcgattgggtgtcaacagatcggtggtcgaggaattccttgccaaacgtatagacgaggcgaacatcaacgagttcggacgtttcgatgcactgcgttcctcgcttgacgtgcaacgggcaaaagccttctttgagcagcatgatcacaaggcattgccggtgttcaaggtgcgtatgcgcgccaccaatatgttgaagcgtttcgtactcatgggcggattcgacatcgatgataccgacaatacggatggacaaagcgagacgaagaacgagcactagactcatatacaagaaggggtgtttccgctggcatcagcggaaacaccccttcttggactagtcgatatcactccgcagcaatcgcggccttgagctcctcgaccttgtcggtcttttcccacgggaactcaacgtctgtgcggccgaagtggccgtacgcggcggtcttcaagtagatcgggcgcttcaggtcgagctcgtcgatgatggcggcggggcgcaggtcgaagaccttgcgtacggcggcggcgatctggccgcgcgtcacgccttgctcggtgccgaaggtctccacgttgacggataccgggtcggcaacgccaatagcgtaggcgatttggatctcgaccttgtgggccaggccggcagccacgatgttcttcgcaacccaacgggtggcgtacgcggcggaacgatcgaccttggacgggtccttgccggagaacgcgccaccgccgtggtgggcagcgccaccgtaggtgtcgacgatgatcttgcggccggtcagaccggcgtcggccgccgggccgcccaggatgaacgaaccagtcgggttgaccagctgacggtagttgtcatgcggcaccttggaacccagcacctcatcaagcaccgggtcaatcacgtgcttcttcagctcaacagcaagccaatcctgcgtaacctcaggatcgtgctgagtggagatcagcacggtgtccagacgaacgggcttatcgtcatcgtcatactcaatggtcacctgggtcttgccgtccgggcgcaggtgcggcacttcgccggacttacgaacctcggtcagacggaaggcgaggcgatgtgccaagtagatcggaagcggcatcagcgtcggggtctcgtcggtggcgtagccaaacatcacgccctgatcgccggcaccctgtgcttcgtaacgctcttcgcggctggcggcggtctcctgatcgccagtcagacgggcaacgccctggttgatttcggcgctctgctcggtgatggccacgaccacgccgcaggaatcggcgtcaaggccgacttcggaggaggtgtagccgatgttgcgcagggtttcgcggaccttggactgcacgtcgcagtaccccttggacgtgacttcgccgaagatcaggaacacgccagtggcggcggaggtctccacggccacatggctggacgaatcctgggccagcaaatcatcaagaatggcgtcggagatttgatcgcagaccttgtcagggtggccttcggtcacggattcggcggaaataagccgatgttcttctgtcatatcatccctttcttcaggacttatcgccccgcgggatgcgaggcacaatgatacggtgtcaatttttacttgtcactgtggaagcgggcataaataaaggctcgtgccaaccagcgcggtggcgcgagccttgcgtcttattcgctcccgatgttgagttatagccgattgcgataactcaggcaagcgtgtcgctcaaaatcagttgtgagagaactctcacaccatcattcggcgacgaactgtccaaacaatccaaacgaattgtcggaatcgatcagttgccctcgttggcgtcgtcctcgcccaaggtctcctcaagcaggccctcgtcgatttcgcggaaggcgatggacaggggcttctcattgttctggtattcgaccagcgggccgatgttctgcagcaggccctcgttgagctgcgtgaagtaggagttgatctggcgtgcgcgcttggcggcgaaaatggccagcgcgtacttggaatcggcgtgcttcatcaggtcgtcgatcggcgggttcgcaagaccgtcgggtgtcgggtcagtaccaaaagccattgttcttatctccagacattggaaaatctatctcaaccgaagcaagtgtagccgtttggggggacttctgtcagccctataccggactctcgccagaggaatgtattccaaaaaaaactgtgagaaacgttacgtttttgaaaattccactattcgactcttgacaaatggcgtgtccctcgcaaaggcttgaatagaaccatgactgaaatgcgatctgcaaaaattatgtcagggcgcgtctttgcaggcgcccgagccctctaccgtgctgcgggcgtcagcggagacgacatgggcaagaagcccatcatcgccatcgccaactcgttcgatgagttcctgcccggccatgtccacctcaacaaggtcggccgcatcgtttccgaggctatcaaggaagccggcggcattccgcgcgagttcaacacgatggccgtggatgacggcatcgccatgggccacactggcatgctctactccctgccttcccgcgacatcatcgccgacaccgtcgaatatcagtgcaacgcgcactgcgccgacgccctcatctgcatcccgaactgcgacaaggtcgtgccgggcatgctgatggcagccctgcgcctcaacattccgaccgtgttcgtctccggtggcccgatggaggccggcaccacggtgctcgccgacggcacagtcaagagcaccgaccttatcgacgtgatgtacgccaccgccgacgacaacgtctccgatgaggaactgctcaattacgagaagaccgtctgcccgacctgcggctcctgcgccggcatgttcaccgccaactcgatgaactgcctgaccgaggccatcggcctggccctgcccggcaacggcaccatcctcgcctcccactcctaccgcaaggacctgttcgagcgtgccgccaagcaggtcgtcaagatcgcccaccagtactacgacgattccgacgattccgtgctgccgcgctccatcgccaccaaggaagccttcgagaacgccatgaccatggatgtggccatgggcggttccaccaacaccgtgctgcacatcctcgccatggcccagtccgccgacgtggacttcaccctggacgacatcgagcgtatttcccacaccgtgccgtgcatctgcaaggcctcgccgtccggcaagtgggagatttccgacgtgcatcgcgccggcggcatcaccggcatcctcggcgagctcgaccgcgccggcaagctgcacaccaacgtgcactccatcgactatccgacgctggaagccaagctggccgattgggacatcatgcgcccgacctgcaccgaggaagcccagcagatgtacaaggccgctcctggccacatcatctccccggagccgtggacccacaccaccctgttcgattcgctcgaccgtgaccgcgccaacggcgccatccacgacatcaaccacccggagattcacgaaggcggcctcgccgtgctgcgcggcaacctggcccccgacggctgcgtggtcaagaccgccggtgttccgccggagatctggaagttccgtggaccggctctggtggtcgactcccaggagcaggccatcgaggtcattctgaacgacaccctgaagcccggcatggcgcttgtgattcgttacgaaggcccgaagggtggcccgggtatgcaggaaatgctgtacccgacctccttcgtcaagggcaagggcatcggcaagcaggtcgccatgctcaccgacggtcgctactccggcggttcctccggtctggccatcggccacatggcgcctgaggctgccaacaagggcccggtggcgcttatcaagaacggcgacatcatcgatatcgatatcgaagcccgttccgtgaacgtcgaactgactgacgagcagctggacgagcgtcgtcgcgagcttgaggctggcgacggctacgtggctcaccgcaaccgccacgtctcccaggcgctgaaggcgtacgccgccttcgcccgctcggccgacaagggtgcgacgcgtgacccggagctgatcaacaagctctccggtctcaactgatcgccgattgcatagctgaaaggcccggcatcttctttatgaagatgccgggcctttactgtgcttccgaaggcgggagcgatattgcttgttatcgcacgcaggcggcgggggagaggcgtgcgcctcgggcccagtcggcggcgcgcatggccttcttgccttgcgccttgacttgggtgagttccagcggcgtgctgccggtaccaacccacacgttcttcttgcccaccttcagctcgccgggctgaagctcggccggagtgttgggattggactggtcggccggttgtgcggcgagaatatgcagggcgagggatttagcggttgactcgtcattatcggcgattggcccctccgcaaacagttcggtccatgccccaggatgtggcgtgcaggcgcgaacctgacggtcgatggcctcggcctcgtccgtccagctgatacgagcatcttccaccgtgattttgtgcgcgtattccaggccttcggccggttgcgcggtgaatgtggcagtgccctcacccacggcggccaaggcatccacatacatgggcgcgccttcctcggccagacggtcgaggagttcgccggaggtctcacggccggtcagctcgatggtcagggaagcgacgatcgggccatcgtccaaaccctcgccgaccttgaacacgtcggcgccggtggtcgggtcgcccgcccaaatcgcacgctgggcgggagcggcgccacgccacttcggcaagttggagaaatgcaggttgtaccagcccatgggcactgcgtcgagtacgttcttaggcaggatattgccataggcgatgaccgcggcgatatccgcatgcaggttgttcagcgcttccatgaattcgggggagcggggtttgagatcgatgacgggcaacccgagctccagagccgtcgccttgaccgggctgggcgtgagcttgcggccgcgaccggtaggcgcatcggggcgggtaatgacgccgaccacatcgaagcgtggatcggcggcaaaggccttgagcgagggcaccgctacatcgggggtgccggcgaacacgagtttgagcatggtcctccttaaaacgtcgatgctcactgcacggccggaatgttcacgccattggcgatgagcagttcacgcagcttgaccggatcctggaaacgcacgccacggatgccggccgcattcgaaccgacgatgttcatggccttgtcgtcgatgaacaacgtgccatcggccttgataccgaactgattgagcgcggcctcgtagatttccttgtgcggcttgcgcagcttgacgaaaccggagacgagcttgccatcaagctgctgcagaatatcgcactgttcctcggccacgtggaaaaggctggattcccagttgctcaggccccacacgccaataccggcggccttcaggtcattgaccagcacgcgtgcgcccggcacgatgccggtcagggagtcgcggaagttcttgatgtagtagtcgaggatgtccgcccacttatcgcccctgtcacggcgcatgatggcgatggcctcgtcggtgctggtgccgccgtccatcaggtcgttgacatcgtagaagccggagatgtcgttgtcgaggaattcgtcgatggtcttctggctgtagcgggggatgagcacggccgctggatcccagtaaatcagcacgttgccgaaatcgaagatcacgtcggtgatcggcttgccggcgttcgcggcggcctcgccgtccgcgaccagcacgtcgtaatccatatccggctctccgggccaacccttcatggtgtcctccttatagcgatgttcgttctgtaatcatcgtttcacgtgttggagacgattagatcagatctttgggatctactcggaagcgaagctcgccgggctcgcgggacgccacatgacgagaggtttcccggtgcagtcgggccgccagttcggcccgccgactctgcggcacgcggattactgccttcacccggtcggccgtggcttcgagctccctggcatcaaccgtgtccggttgcgcgatcggcaccggtcccaacatgccgggcagctcgccgcaggccgtccaatcgccgcccagggcgccgatacgctgcatcagcgtcatcaccgcatcacggcgtccccatacgcaggcggcggccacggccggcggcataccggtctccacacgctcctcaagatccttggctgcaagaatcctcgaatcccagagcatcagcgattgggcgatggccgggtcggtttcgccgagaatcaacgcctggccgccacgggaacgcggcgcgcacaacgacaccgcacgcatccacgcggtcaatgtatccaagcgagcatccacgcccaacgcatacaagctggtccaagcgtcgagcacggccacggcacgatactcatggccagccgatccctgctcggcactgaccggacgcacgcgcggttcgaaaccgggagtggcgatgacgatcatcggctgacaagccacatcgcgcaccaggccctgcgtcttgctggacaaaactactggcacgccgcggaacaacccggccagttcagccgcagtgcctgcagcacccacgcgcaccacacgcatacgttcatgcccacagcccgggcacttccaattgatggcagcagccccacaccagcggcatcgcggtgtggaatcccggcggtcggccggtagttgcaacggtccagaacacttggcacaacgcgcctgacgatggcatttcgcacaactcagagtctcactgacgctgtcttgcggaatggacagcagcacggggccgctctccaaagccttagatagcacgcggacggccgtatgcggcacgcgcgccccgatggacgggtcggcaagacgcgcaagttcatcgcgattgagccagcgcacccaaggagtggcgtccttcagcggcgaggcgagcggatgaattgtggtggaatagccgctcactggggtctccactgtacctggaccggtgttttcccactggctttgcggggtgcgcgcattggccatggccacgaacacgccgccatgggacttggcgcgcagccgcatcacgccacgggcctgtggatatggcatcataccgtccatgttctgataggcggcatcctccagaatggcgaacagcgccgggccttcaaccggcgcatacatcaccgcacgggtgccgatcaccaccttcacctgtcccaacgccacagccagataggtgcgataccggtcggccgcgggcatggtctccgcgttaagcacggcgacgtcgcccacccagccgccggccggagcaggggcgaacggtttgagcccataattgcgcagcataggcatcaggtcttcgacctcgcgcatggtgggcaattcaaccacggcagctttaccggcactcagcgcagtggccaccatccatgccatgttccgttgccactcctgtgcaccgggcagcgaatcaaacacaaaagattggaaacgctgaccggtaagcgcatcatgaagcacattgacgtcggcgtaattggcggtcagacgacgatacccctgcgcagccccctccgaaacggtactggcaacggcaaaggtagagccagcaggcatggtcccatcgggattggtgccacgcccggcaaaaccgccttgcgtattatctggtagggagccgccgaccggtcggcggaacgacgcggctaaccgctgttcggcctccaccttggccacgcgcggtggcacagcgaaacgcagaatattggcccgtgtgccgccataggctttggcaatcagaccgatatcctcacgcatcgatgcgggaaccagcacatcggggctcaacacccgttcgatatagcgaatcgaagagcgcggggtatcgctggtatcggtgcgtgcccagatcacgccgctgaccctttgaccgccaaaccgcacgcgcaccagcacacccggttgtgcggcctcgctgtctttttcatcaatgaagtaatcgaatgtctggccgaggtggagcgcctgcacatccaacacgacttgcgctatgggatgctgctcggccggcgtatgctccgcagacgcacgtttacgccgtttgcggggagccagccccgcaagcgtcaactgttctgcgcctgaagtagtcatggctcaactataagtgccggagccgaggtcggtaaaattttaccggcgcagataatcgagcacgtgggttaggtcgcggtcgttgatggctttgtcggcggcgagctgggtctttggcttggcacagaacgcgagacccagaccggcggcctgaatcatcggaatgtcgttggcgccatcgcccacagccacggtctggctcatcggaatacccaaacggtccgcccacgcttgcaaggcgtgcagcttcacggtcttgcatacgatctcaccaagcactttgccggtcagatgaccgtcctcaacctcaagccggttggcaatccaatagtcgatatggctctcggccgccaacatgtcaaccacttcatggaagcctccggacaccacgccgatcttccaaccgtgttcatgcagcgtgtcgataagttccagtgcacccttggtgaaatgcagcttgtcatgcaccgtgtcgaacacggagatcggcaggccctccaacagggccactcgtgcgcgcagcgcatcgcagaactccagttcgccgcgcatggcgcgtgcggtcactccggcaatctcctcaccgcagccagccaccacgcccaactcgtcgataacctcttcgtcaatgagcgtggagtccacatccataaccagcaggccgggcttgctcagcgtcggcacagaaaccgcagaatcagccgggctcccaacttcgctctcggcggacttgtcaacaaaatgcacatcttcttgcgtcatgcttctgattctgggaaaaccttgggacaatgccctctatgagtttttccatggcagccgccactattcttgcaaccgaccccacacccatctgcaccaccaccgaacccggcctgatcggcaccatcaccgactggctgatcatgctgatggaaaccatcggcggtatcggcgtggccttggccatcgccctcgaatccatcttcccgcccatcccgtccgaagtcatccttccgctctccggcttcaccgccgcacgcggcaccctgagtctgccgggcgcaatcatctgggccaccatcggctccgtactgggtgcctggaccttgtacggcatctcccgctgggtgggcctgcatcgcatcaatctcgcggcagacaaaatccccggcgtcagccgcaaagacgtgagcaaagccaacgactggttcaccaaatacggcacatggtcggtgctcatcggccgcgtgattcccgtggtacgctcgctgatttcgattcccgccggattcaaccgcatgaacttcctgcacttcaccggctggaccctgctcggctcggccgtgtggaacaccatcctcgtttccgccggttacctgctcggcgaccagtggtgctcgattcaaggcgcgctcggcgtgttcgaggacgtggtcatcgcggccgtgattgtggtcatcgtatggttcgtggtgcgaaaagtgcgtactgttatacgtaacaggaaatccgccgacggcaacgaatagggtctgccgactgccataagttgccgaaaatcccggatagaagggaagcgaagaacccgcatgagcgacaccgaagatctcgccgcgctgaacgatcgcctgatggccaagaaccatgcgctcgccgaagcgctgagccgcgccggcaaggaactgaccaaggcgaagtcacagctcgcccagctcgctcagccgccgctcaccttcgccaccatggtcaaggtcgattccacccgcaccgatgaagacggcatccagcacgcgtcggccgaagtcatttccggcacccgccgcatggtggtgcctgtggcctccaacgtcaacgccgcccgcctgaccgccggggccaccgtgatgctcaacgagaagctcgtgctggtcgagcagcgcgatgctgacaccgtgggccagattcgcagtgtcaagcaggtacttgacgacggtcgactgatcgttaccgacgcctccggcaatcccgtgctcatccgccgttccggcgcgctcgcgtatgcgggcatcaatcagggcgaccgtattatcgtcgatccgtccgtccgcctcgccatcgaagcgctgcccgccgagggcgacaaggatctggtgctggaggagaccccggatgtcacgttcgccgacatcggcggcctggatagtgagatcggtcgtatcagggacgccgtccaactgccgttccagcatcgtgcgctgtttgagcgctacgatttgaagccgccgaagggcgtgctgctgtacggcccgcccggcaacggcaagacgatgattgccaaggccgtggcgaacgccctgtgcgagggtggttacgattcgaatggcgacggctcgatcagcccggccgaaacccatgtcaagggcgtgttcctgtccgtcaagggcccggaactgctcaacaaatacgtcggtgaatccgaacgactgattcgcctgattttccagcgcgcccgtgaacgcgccgcggacggcaatccggtggtcgtgttcatcgatgagatggattcgctgctacgcacccgcggctccggcgtctcctccgatgtggagaccacgattgtgccccagttcctctccgaactcgacggcgtggaatcactcgacaatgtgatggtaatcggtgcctccaaccgcgtggacatgatcgatccggctgtgttgcgaccggggcgtctcgacgtcaagattcgcgtcggccggcccaaaaccaatcaggccatcgccatcgtggaccattacctcaccgacgacctgcctctggaagatggcgtcgacgcgcacgccttgtccgccgtgctggtgcatgacatctacggaacctccgaacgccgccatctatgcgacgtgcaggaggagaacggccagtggcatgcgttgttcctggccgacgtggtctccggcgcgatgctcaagaacatcgtggaccgggccaagacccgagcggtcaaggaatccatcgaaaccggcttggacgtggcactcaccgtgccgctgctcgctgccgccgtggaagacgaataccgcgagacccgcgattccatggccgacgtggaccccgaacaatggtcgcgcatcaacggcatggacccgatccgccgcatccgcaccgccgaatagctcaagctcaaggagcactacatgaccgttaaacgagtgatgggcaccgaaaccgaatacgcggtatccctgaacaccccggaccgctacaatccggtgcaactgtccttcgacgtggtgaacggcgccgcggacagccacagcaaatccatccgctgggactaccggcaggaggacccggtcaacgacgcgcgcggcacccgtctcgaacgcgccgccgcccgcccggacatgctcaccgacgccccgcagctcaacatcaccaacgtgatcgcccccaacggcggccgcgtctatgtggaccacgcccaccccgaatactcggcgccggaaaccaccgacccgttcgaagcggtccgatacgaccacgccggagacctcatcatgcaggccgccaccgaacgcgcccgcaaacagactggcactcccattgccctgcatcgcaacaatgtggatggcaagggctcctgctggggcacgcacgagaactatatgatggcccgcgcggtgccattcgacttggtcacacgcctgatgaccctccacttcgtcacccgccagatctacgccggctccggccgcgtagggattggcgagaacagcgagatcccgggctaccagctcagccagcgcgccgactacatccacgccaaagtcggcctgcaaaccaccttcgaacgcccgatcatcaatacgcgcgacgaatcccactccaccgatgcataccgccgtctgcacgtcatcgtcggcgacgccaatcgcatggaggtgccgcaggcactgaaactcggcaccacgagcatgctgctgtggctgctcgaacatgcggacgaggccggattcgacctgaacgccttcctcgacgaactcgaactgtctgacccagtcgaggccatacacaccgtttcccgcgacctgacgctgggggcaatcttgccgctggccaacggcggcgaaaccaacgcatggcttatccagctcaaactgcgccaagccgtctaccaggttgccgcactggtcgaaggtaccgacaccgccggcgaacccgcctggccggacaaatccaccacatccattatggcgatgtggcagcaggcgctcatcgactgcgcctccatccgccatgccgccgacgatgacgaacgtctggccatgaccggcgaggccagccgcatcgaatggctgctcaaatggcagctgctcgaaaaactgcgccgcaaaatcaccacaacgtccgcacccggcgtggccaacggatggaatgatccgcgactgaaggtcatcgacctgaaatgggcggcgctcgaccccgaggacagcatcttcaccaaactcgaaccccgcaccgaacgggtggtgagcgccgccgacatcgcacgcgccaccaccgaaccgccggaagacacccgcgcctggctcagggcaaaactcgtggcgcaattcggcgatgaggtggccgccgccagctggtcccgactcactgttcgcgacccgcgcgccgcagacgagggcgaggcggtcgaattctacggcaatgccggccatatggccgctaccgaccatcacctgttctccctcgacatctccgatccgctcgccttcaccaaggcgcactgcgaaaccgaactcaattcagccgaacacgccatcgatctgctgaagtcgctggccatcaacgccgaacgatagacttggtagctatggaagaaacacgcgaagagaccccacaggacctgcgcaaccttgcgctcaaagtcgccggcctgctcgaagaagccggccagcatgccctccacgaccaactcaatccgcgtaacctcgcccagccgagcaccgagaacgcggaccgtggcccccgctacaagcttgaagtggacaacaagatcatgcgcttcatgagcgccagaatcgccgacatcgcccacttcgacggcttctggaccacccgccccgccgaaagccgccctggccagcgttactggtacatcggcaagatcgacggtgtgatcaactacgtacgtcgcatgagcgaatggacggtgaccgccgccctgttcgaattcggcccggacaacgagcccaagccgatcatcggcatcgtgcacgccccggccctcggcctgacctacctggccgccaggggagcgggtgccgtgcgcatccacaaaaccgcggtcggcgagaagcgcgacaaggtcgtgccgtcgatgacctcctcgctggatggttctgtgctgagctacggcatgtccttcatccccagcgaatcgcagcgtgcgctcgacgtggcctcctcgctcgccggacgcccggccgacatcaagcgcgtgggccccgtctcgctcgacctgtgcaaagtggccgacggcacctatgacgcctacttcgagccgatgctgcacgtgtgggatatcgcgggcatcgccgccggcaccgtagtggtctgggaggcacagggcacgctgagccgttgggacggcgaacgcatccactggcgtcacgataacgatgtagtggcctccaatggactcatcatccgcgaactgcagcattacctgcagcagtatccgtggctcgactccatcaaccagcgataattttttgactcctccggctcccctcgggtgaggggagccgtcggccgaaggctgactgagaggagtttgacagcccaagaagaagacaacatgccacaacaattcgaacaacctcaagcacagcaggccgcgacccaggaagacgacgccctcgccaccacgcaggccgccgcccaaaccgagtccaccgaccaagccgacgtgttggacgacatcctcgacgacatcgaatccgccttggaaaccaacgccgaggaatacgtcaacagcttcgtgcaaaaaggcggcgagtgatgccccaactgcgtgacagcggcacccgctccctgcacgccacggaacccgtaccatccgccgagatggacgggttctgccgtattttcggcgtcgaaaccgaatacggcgtggcggtcaccggtgccgaacgccccgtggacgccggccaggtggcgatgaccatgttccagcccatcgtctcccgttcccgctccaccaacacgtatctggccaatggctcacgtctgtatctggacgtcggatcccaccccgaatacgccaccgccgaagcgcgcgatccgcgcgaggccctggcccaggacctcgccggcgaacacgtgatgcgcaacctagccctgaaggcccagcgcaagctgcgcgaatcctacggcgcacacgccacgatccatgtgttcaaaaacaacgtcgactccgccggccacgccttcggctgccacgaaaactacctggtccgccgcttcgtgccgttggagaccatcgaacaccagctgctgccgttcctcatcacccgccagctgtacaccggtgccggccgcatgaccccggacggcttccagatcacccagcgcgcggacttcctggacgaggccgtctcctcggccaccacccgctcccgcccgatggtcaacacgcgcgacgaaccgcacgccgaccccgactccttccgccggctgcatgtgatcatcggcgactcgaaccgttcgcaatggtccacatggatgaagcttgccgtcacgcaccttgtgctgtgcgcgatcgaagacgccttccgccatggcgttccgtccggattcgagcagtatgcctttgctgatccggctgccgccaatcgcacggtcagtcgattccttgacaatccgcgcgccgaactgacgttcgaatcaggcgaatccgtgtccgcactgggtctgcagcgccggtattatgcggcggtcaaggccttcatcgaaacccatggcgatgcgctggcaagttcgctgccggccaccacgatcgacacgattatgggggagtggagccgcgttctggacgcgctggagcgtggtacatacgatgcgctcgccgaccgcgtggactgggccgccaagaagcgtctgttcgacgcgctcaaacgccgtcgcccggacgtcaccttcgcccagatggaacagcttgagctcgactaccacgacatcgccaacggtcgcctgtacggttcgctcgtagcccgcaaccagatgcgtgagctgctgacaggagacaacgtggaatacgccgtgcacaatccgccgaccgacacccgtgccgccctgcgtggccggttcgtggacgcggccctgaacgtcggggcccagttctccgccgactggacccacctgaccctgaccgcccccgaacgccgggaagccatactcctcgatcccttcgaggccgagcccaccctgggattcgagcagcttatggaagcgctgaactagtccggaataatacggttggacaacacgtcacagcaccacaacaaaaagaccccgaccatctcggtcggggtctttgtcgtcagtaatgctcgaagtaatcgctacgagcagaaggtcactcggtgacggccttcttcagcagggagccagcggagatacgaacgccgtaggaagccggaatgtcaatctgctcgccagtgcgcgggttgcggccggtgcgagcggcgcgcttgacgcgctcagcggagaacaggccggtgagcttcaggccttcgccggacttcatagcctcgacgaacacatcctggaaggcgttaacagcagcctcggcctgagccttggtcaggttggacttctgggcgatcttcgaaacgaggtcagacttgttgtatgccataaagcatccttcttgggtcaggggacaagcacttttgcttagtccatgttgtcatcaatgatactagcgcatgtttctgcgaaaacccgcgttttataagggttttcacatctatttccccgaagggggtatgaaaatagacgaatcagacaagattatgcttgtcaagccacttcatggccgccgcgcccagcggaatgcgcagccagtagaacaccacgcggtgcagcaaagtggcggaaagcgccacgccctgcggcactccgaccgccacgaacgcgaatgtcagcgccgcttccacaccgcccagaccgcctggagtgggcactgcggaacccaatgcataggccagcaggaagacgaacgtcgtttcaatcggattcgatgaatggccgaacgcttgcagggccgcccagaaagcgagcccagtggtcgcgttctggaacagcgcgcccaggcagctgactgtgagctgtcggggctgggaaagcacgtccagcagctggttgatatacgtcttggccagcggcataagacgacgggtcacccagtggcgcaacggcggaatcatcatcgcaatggacagcaccacgaccacaacgcccagcacgataaccaacgtgtttgtcgggattgcgccggagaacatgttgcggccggtgaacaggccgatgatgaccagcatggagaagtacacggcgtaatacaccacgagcgcggcgctcataattgcggtcgcctgggtgttgcgatagccggatttgcgcaggaactgcaggttgacgaacgaggggcccacgccggctggcatggatacggtggcgaagccgcctgccacctggctcatgaagacgcccatattgtcacgcttgtgccgcgccatcagggaaccgagcgaaatcgacgagccgatccagccgcagacaccgaacgtgagcgtcaccaccgccatcaacgggttggcgttggtcagcgcggtgatgatctcctcgggcttcagttgggtgaagaccacgaccacggccacgatgaccagcagcatggtgatcatcgaacgccaggagaagcgggccagcgtcaccggttcggcggattccaccgtctcctcatcgattatggtgttgatgtggtctcgcagttccttgagcagctgcttgtcccacgtgcccagcgcgcgcgtgggggaggggaccgcgaccttctgaatgaacggggccaaggccgtcagagtcgtgtctccccacgcctcgcgggcggcctccaccgccggttccacgccgatcagcgcggcgaacagcactagcagctgaactttgtcgagcgcggtgttggccggaccggaagcgttgtcgccgttgagccagccggcaatcacggcggtgccgtcttcaagccgggcgagcgtgtccggcgtgatgcgccggtgcgtatagccgcgccggctcgccacggacaggtagcgcatgtaggccacggcatccgccttggtaagcgtgttcaggttggcgggcagctcgatggtgtgcgcatccagcaccagaatcgcggattcgtcggtatcggcgatgccgtagggtgcgggcgcgggcagtttgatattgtgcagacccagcagcatggcgaaatgatgctggacggcgtcacgcacggaacggtcacgtcggatggacacactggtgaaacgcacccagtcccacaactgcttcagatagccgacggtatgggtctgcgcgtcgatgacggaaacgatgaaacgacggttgtccgtggtatccagatcgtagatgcgcgagccttccgccagatcgtcgtccagcgtgacggccagtgaaccgtggccgacgccgggctcctgatgccgaatcagcgaggcggtgtccagtccgatgcctttcagggcggcgaccagatcttggccccacacgcccttgttctgcgtgccgaccacgaatcggatcagcatgcccactgtgcggccggcggccatcgacaccagcatgccggtgaccgaatgccacgacagcaccaccatcaccgcagcgatggcatacaggatattccagctccatttgaccgtggagcgggtgcggcgtggcccggcggcggtcaggaaggacgccatgccggcgtagatgtcgggcaacagcccggagccgtatgaggtggcggctgagactagtgccattggcagggtgaaatcgttcagactgctgattgccgtcgatatgacccacacaatgccgtatccggcaaacatggccagcgcggacaccgcagcttgcagccattcgcgggccaagagcaactgagcgagcacgataactacgatgaccgtggtggccagctgcgtcagtacggtggaggggaaagcagccagccagttgatggcttgggcggcggtatgcgcgtcggattcgacgccgcgcgtcatgccgcccagatacacggcgaacaccatgaccacggcggccatcaatagcgacagaccggctcgggtcaggtcgccgaagtcgcgcgtgcggcgcggagcgatgtcgtcgatgtatggtccggaatcgttgctgtcgtcggttgccgggctgtccggtccgctgacagcaaaactggccgaccggccgtcaccagaggcgatcggccggtcggtagtggaggaggtcgccttgtccgggcgatcttccgtagtggactgctcctgttcagtagtcatgaaatggttacctgacgcctgtccttgttcggttcagtttgcggtttggtttgtgactcagcgcagtagtgtggtggatgcgaaggattcgagggactcgagggactcgagagactcgcatcgcacctatttcagcggtcgaaagcgacgagctggctggccacaccggtgtaggtggcgggggtcagagccttcaagcgagcggcggtttccgggtcgaaggactgctggtcgatgaactgctcgacctgttccttgttgatggtgtggccgcgcataagctccttgaccttctcgtacggcttgtccatgcccggcaggcccttgagctcgcaggcgcgcatggcggtttggatcggctcgccaagcacctcccagttctcatcaagctcacgctcgatgacgtgggtgttcgggtggatggactcaaggccgcccatgaggttggtcagggcgagcaaggagtagccgagcgcggaaccgatgttgcgctgggtggtcgaatcggtcagatcgcgctgccaacgggattccgccagcgtggcggagagggtgtcgagcagcgagcagctgatctcgaagttggcttcggcgttctcgaaacgaatcgggttgaccttgtgcggcatggtggaggaaccagtggcacccttgaccggcacctgggcgaacacgccgcgggagatgtacatccacacgtccacgcacaggttgtgcatgatgcggttggcgtgggagacggtggagtacagctcggcctgccagtcgtggctttcgatctgcgtggtcagcgggttccaggtcaggcccatgcggttcgtgacgaactcgcgggagacagcgatccagtcgacatccgggcatgcggccaagtgggcaccgaacgtgccggtcgcgccgttgatcttgcccaggtactcctggttttcgatgtgcttgagctgacggttcagacggtagacgtagacggcgagctccttgccgagtgtggtcggcgtggccggctggccgtgggtgagagagagcagcggcatatccttgaattcctcggccttgccggcgaggtggtcgatgatgcgcttgaactccggggtccacacgttttccatcgcgttcttgacgcaacgggcgatggagaggttgttgatgtcttcggacgtgcaggcgaagtgcacgagggtcttcagctcgtcgttgatgttggtcagctcggccggagccttgtcgatctgatcatcgatgtagtactccacggccttcacatcgtggtgggtgatggcctcatgagcggcgtgctgcttgatgccttcggcgccgaagtcctcgggaatggcgcgcaggaaggcctgctcttcggcagtgaacggcttgacgccgtcaacgatcggctggttgccgttgccctcaaagccgttggccagaagaatcatccattcgacttcgacacgcatgcgttcgcggttcagggcaggttcgctcatgtattcgacgagcggggcggtggccttgtgataacggccgtcgagtggggtcaatgcgattgcgggggaaatatcggtaagcttcataacctccaagggtacttccagccgtgaaccgagcggctatactgtggtgcggcgttcccgcccgagccgcacaggtcaaggaacgcccgtggttcgattactgtgtgcggcctttaaggctaggagatcaccatgcctgcaaccaccattcatactcttccgaaacgtccgattgccgtatcgtcactgaaatggcagccgttggatatcgcggtcggtgccacgctgggtgcggcctgcggcgtgatcttctggggattcaacttcgcgtacatgccgatctattcggtattcggcgcgattctgcccggtttcgccagcatcgtgcacgccgtctggtacttctccggtacgctggcggtgctgattctgcgcaaacccggagcggcgctgtacgtgaaccttatcggcacgctggtcgaaacggtgattggtagccagttcgatttgggcttcgtgattatctcggcgctgttgcaaggtgttttcgctgagattccgttcgccttgacccgttaccgcatgttcaatctgccgatttccattgcatccggtgcgttggtcgccttggaatacggcacatatctgatgctgtttcgctacgtgggtgtgtcattcgtcagcccgcgtggcattgtgcacatgatttccgaggtcaccggcggcgtgcttatcagcggcgtgatggcctggtatctgatgctggccatcgccaaaaccggtgtgctcgaccgcctcgcatccggccgcgcactcatcgagcgacgcgcctgacactctttgcgcgccactttcccgggaatgttgcgctgatagagggggtttcgggcatgctagcgcaacaatcccgggaaagtggcgctagccgcgtctctgcggtgattgcattgtggggtagccgattgatgctaagcattgacaagttgatgtgcccgttgccgtgagaccccgagtatatcgcctatttgctgtagggcgagacccatgccatgtagttcttgtgctgcggcgcgagtttcccgcgctgcgttcgatctgcattccgcttcttccttgcgcagtcgccgagcttcatcaagatgctcctgcacggattgcggcagctttgtctctacggtgagtgcgaaatcagcatcttgtgtcatgacggtgataaggtcgcgtgccatactttcaatctctgctgttgttcttgcctgcgtgaaaccgataccgggaatctcaagaatccagtatttttcgccaggacgaacgatgacctgatatgttttcactgctgataccagcctttcccgagtttggcttctgcttccttacaaatgatgttcgcgaggttgttgtcgatttcgttatgacgtgggatggggaatcataagtccatcgagttggaatatctcatgactccctccttgcctgatactttcaaacgtgacattcttgcgttctgccgcttgcttcatcagtttgatgagccatctcctactcgtcattatattgttaactcctttcttgacaactctgtcaagtgtggtatttacttttaaccgccgaacgtgctgaactcggtggttcgctcgctaggggcaatggtcgcggactgggtcatgcggccttggtagtagcgggtttccttgagctctccgttgataacttcctggaaatgggcttcgtggcgttgcacggcgggggagccgaggtcggtggcgttctgataggcggcctgatggtatttgatccagtgcgacaactccctgccgttggtcgaaccagccacgggtgcggcgtcatatggggtcagaccggtgatgggcgttgcgccgggagtgcatgagccgtccgaatgcactgtggatggtgttgccgcgggcgcgggcgatacatgcccttgtacggtgagccagttatcggtgaccgggttggcggcaccatccagtgcggcgaccagttcatcatcgatttccacgctggtgacccacgtgcgttgcggaatcggatgattggccaccggcgatccggctgtcaccacatgctcgatggtatattcctccgcccaatccgaggcaagcgtggcggcaacgataccaccctgggaatggccgatcagcgccacgggctcatccttgccgatgcctgcctgacgcatcgcctcggcaaccatgcgagcgctgtccgctttcctgcggcgctcctgatcggcgctcatcagttccacgttctgcgcccagccaaatggtgagtcaggctgtccatcggtacccgggatggtgaccagccaggagttggttccatcagatcgttcatagcgttgaatggcgatggtcccatattcgagtccgctgttcagctcgattttgccgagccgctcttcggcgagcctgcgcagattctccattgactcggccaccgatccgcttgcgcggacaacgtcggcattcgcctgcacctcgcgcacgtccagatgattgccttggacgacgtctttcgccgggccggagaaattggcgattttccccgcagccttgttgacctcatcggtgtgcgcaatgctcttgccgataggtacgccgccaatgattccgcccgcgccgctaagcactccttcctggaacggataggtgaacgtggacatccatgccgggttcggtttgccgtcaatagtccagccggccagaaagccgcccgccgccacagcggcaacacccgccgcggcatatcccggtttggcctgtgtgccggcctgcaataattcggtaaacatgcgccgagccgtcatctccgcctgagaatacagagagtgtgcgcgaatcagcagatcggccgcgccacgcagatcatcgctcaaccgctgacatgccgttgcatggtcataacaccgattgcccagcgcggcatatggtgcagtgacatggccgggaacaacggcgctcggatcgcccgactgcaaggtgacgcacatcggcgcactatgccgatgtgactgcaactgtaatgcggccgattcccaagccgtggctatggccgcaaatcctgccgcctcgtcatcgagagccttggctatggcggcatattcttcaagagtggctggcgcatatcccactccgccgtaaacggacgattccacttgccagtaatcgtgctcgctcatgacgacccccaagccaatcggtgggtggtctccatgtcttgcgcgagactggccgaatactgtgcggtgcgactgagccgcgatcggaatagatcggcggctttaccggtccacacgatgttgctggagcggttcacggccaccgccgtctggtccgattgcgccagtgtggccgcacgctggacggacacgaggtcgcgactacgctgtaccgccgcatggcaagggcaagtgccgtaatcgaacggcgtcaccgtattgccggcaaagccgccggtgggatcgatgggtgctgggttgctggtgtaggtattcatatatccagctaaaaggacaagactcatgcttgtccagccggaacgaccaatgtggttctagcttgccgattttgggtgaagttatccccaagtgttgtgcatagtcgtaacgattatccacaaatagcctgtttggacataccttggatcagccatggcctatcgaaaattggataaatgccaaagccgacagccgaaaccgggaaacagccgcgataaagccatgacccgtgagggtgtgagaaaaaagaacaactgtgaacgactgcttaccacggcttggtagccccggtacccttgttctgcgtcgctttctgctcggattgggtggtgttcgactgggtatcggtggattgctgattggccttcatcagctcctcgacctgcttcttctgttcgtcggtcaacgcgccgccctttttggcattggatgaagaattctcggattgctgtgccgactgggcttgcccggaatcggaaccgctgttctgcgcctcggcctgtttcagggtgatcttcgtcagctcggaagaaatcgaagcattggtgtcgatggcgtccttgacttgcggcaacagaagcgtgcgcattcgcccggcctcgtcgaattgcgcgtcggtctgctgctgttgcgccttgagcgtggtgatatccgtggactcgtcctgagccgctttgatattggcgttcaatgatgcggtggcctgattgaacgtaatcgaagcggacaggtttactgccgccacgccggcaaccagcaacagcaatacggcgccacaagccaggacgatacgtgcccaaagcggacacttcgcccgcatccgagtattcgccgagccgtcgttctcgtggatttcgttactgtttctcacagcagtctccttgaggttgcgatccatgcaccgacttccatggcaagcaatatcgccaacgcaatggccaacggccataccaccggcgtggtgcgtgtgcgttccctgaccgtggtggccatgcgccactgcttcgacgacttggccgaaaccgaatccgccaaagtctgtgaagcgttcacggccacatacgtgccactgatctcgtcggcaatgtctttaaggttcttctcatccatcttggagatgccgggttcgccggtatccgggtcgaccacccagtggtccgtggtgttggaatcgccggcactgacgccatcggcgatgacgggaatcttgccgccctcggtcgagccgacgcccacggtaaacccatcattgagatactggcgcagtgacgagaacgtacgacgcgtcacattcgaggtctgttcgccgtcagtgatgaggtacagcacaatcgcatcatccgggtgcgcttcacgaatcgacttcacggtcagcagcaattgatcgatcggagcatccagactggagcccgccgacacggatgtggcttccaccgccaacgtgttggcccaattatcgatggccggcgcatccggggtcagcggcacatcaagcgtccccgaagcaccgaaccgtaacgccgcgaaactggcgtccggataagcggcggtcacatcatgcacggcctggcgtgcggcatcgatgcgggtaatggtcttctcggacccgtatgtggcgtcggccaccgccatcgacccggtggtatccaccgccacaatgacgtcggtggcattgatggcctgtgaggtggtagacgataccacgctgggagtcagtaccatcaccgcgacaatgagcagcataagcgtacgtcgtatgcaagcccacgcggtctcgtcactggaagcacggcgacgaacaaataatgcgatttcgagaatggccagtacggcgagcccggccgccagcagtccgccggcgacccagcccaaggcgggggagaaggtgaatccgttcatcgcctcaacctccatgcacatacgatccagataatgagtatcacggccagagcaagcgtccacagaccgggagcgtccaccatcgaggatttcgccttgttctccacatccgtatctctacgcgactgaatatcccgtaccagctcatctatcgacgcgccattcgattgggtgaggaagatgcctccatgcgactcgatcgcggacttcatatccgttgtggtttggtccgattcactggctttcggcccggaatacaggccgtccacggtgattttggtctgctgggtcaagtccaacgcttcggtcagcgaataggtgggcttgcccgacacgacgttgtcggtggccagcacgatggatgccgcacgctgacggtcggcatccgcatgattggcttcgccataagcgaaaccggggagcatcgccgcgcaagacaccacgccgtcgccaatcaaggaggtggcgtccttgcggttctgcgtgccttcgagccaattggcgatgtcctgatattcggcatcggacatcttatcgatgtcatcctgcgactcgacgcctttcagcgccttgctggcggaggtcaactgtttggtgaccagttcgtagtcgtcggtcagcgggaacaccgtgcgtgaggtcgagttgaagatactcaaaccgatacgttccccctcgaaatgcttgaccagttccaaataggtatcgatgacctcgcgatcataggggagcgtggaccccgacacatccagacacaggacgatatctcggctggaagcgcgttcgtcaccggcgtccacttggctggggcgagccaccagcacaatggccagcgccagcgcaagcaccagcacgctgatggcgagacggcccaaagcgcgccattgacggaacaggcgggaagcgtgctcggtattgagatcgtcatccatcgagaatacaggggtgtcgtcggcggcgttacggcgggcgaacacgacaatcagcacgataatcgccagcgtcgccaagacgccggccagagcggcccaaggccaatgccatgccagcatcatgaacgccacctttccaccagattcgccacccactcggcggcctgctgcacgctggtcgtctgggcgattcggttgcgggcatcatcggcaaattccggtggatacaacgcgccaatggtctgcttcaatgcgtccaatccttggcgattcgcgggcgtgcgattcaggtacgccaaatcggtcagcgtactggaactaagctccttgcctgatgcggcaccggcgaaatcacgggcgatgacggccaattcgacgaaagcctcatgccggggcagtgctccggattcatgacgggccaccacatcgtcgatgcgggaacgccactcggccttggagctggcattgctatgagcgccacgcgcacggtcgctgttccgaggtttgcgtgcggggcgagacagcatgatgatcaacgcgatcagacctaccgccagcaacaggcatgcgacgatggccaccaccaggggagtggtcaaggccaacgactccacgggcctgagatcgccgggatcagtggcgagcgggatgatggggaacatgctgtgcatcatagatcaccagccaaagtcagtccgaccagttcgggtgcagtacccagtctattgcgtgtggtgcgggccaatgcccgggacaccagggcgacgaaacgatcgaacatggattcgctggatgcggatcgaatgatatgggaaccggcacgggtgagctcctgttccaaagccgcggccatatacgcgcgatgagtatcgacctcggccgctgccttggcgttgcgcaggaatgccggcacacgccgtgcactcaagccgtcggtgggagcgtggcgggatgagacggccttgaacggattcatcgtcgccacatcgatcagcaccatcggatgggtgcgggtaatacgacggatcgtggtgatatgccgctcctccatcgcatgctcatcggtggccaatacgatcaatgcctcgcgatccttgatacggcgcgcatattccagcagcgcgtcgatattacggtgatgattccaatcacggtcaagcgccttgtccagcgtgcgttcgaactgcgcgaacccaccgttgaacggcacgcgggtgatactggactcatcgccgaacaccagcgaaatatcgtccgaccggcgcaacgacagtgcggcgaacatacgcagcgcattggcggcaacctgccatgcgcgttctccggaagggcatacgccagtcatctccaggcccacgtccatcagcaaccagacccgtgacgtcgacaggcgctcgcgctcgaccaccatggggcggccttggcgggcgctggtcttccaatcgataagacgggattcgtcgcctggctcataggcatgcacatccatcgcatcgccgctgccgccgcgacgcccggatgcgtgttcgccctccagcgcgcccaaagccttccttacggtaggcaggctcagctgagtgccaagggcctcgatcttcttgcgaacggaatcggaactcacggaacaggaaccgtttcgacgatcttgtcgacgatctgatcgctgaccacgccatcggccagtgcctcgaacgtcagcataatacggtggcgcagcacctcatgagcgaacgccttgaggtcctcgggtaccacatagtcgcgcccggacagcaacgccttcgcctggccgatacgggtcaaggcgatggtggcgcgcggcgaggcgcccaaacgcaccaaggacgacagtcccttgatggggcgggagccggcacctcgtgacgtggcggtgatatcgaccgcataacgcatgatcgcgtcggaaacatgcacgcggcgtgccgccttgcgcaaaaaatcaacgtcggacacggaaatgcgtccgccggtgatggtgtcgggaccgatcatatcggagccgcggcgggtgagcatggccagcatccgagcctcttcgtcgggcgaaggataggtcatgacggccttcatcatgaaacgatccatctgggcttcgggcaggttgaacgtgccctcctcctcgatcggattctcggtggcgatcaccatgaacggcttgggcaaggcgatacgctgcccgccgatggtcgtggcaccctcggccatggcctcaagcatggcggactgggttttggcattcgaacggttgatctcgtccagcagtacgaaattggcgtgaatcggaccgatctgcgtggtgaacttctgcgacgcaaaatcgaagacctgcgtgcccaccagatcagatggcatgagatcaggagtgcactgcacgcgcttgaacgagccggatacgcaggtggcgagcgtctgggcggccgtggtcttggccaagcccggcacggattcgataagaatatgcccgccggccaccaaggtcacgataagcgattcgcgtagattatcctgacccaccagtgtctgggcgaacctcgcccgaatggcgtcggccaggatacgtgcgcgtttggcgtcatcggcacccagcggagccgacacgccgggcgcgggaacggcgaccggtcgtgcggcggtggtcggcgaaggtatgttcggttgcgtggggaacaaagtcatgcccccactgtaactactcacaatgactgttggcctgcctaaagagtccaatccaccgggtcggcacccatggtgactagggcttgattggctctggagaatggtttggagccgaagaatccgcgggaagcggacagcggactcggatgaggcgatttgataatgaaggcattggtcagcaatggctcgaggctttgcgcattacgcccccagagaatcgccaccagcggctggggcttgccgtcggcgtccgtgcgcgcgttcaacgcacgaatcgcggcctcggtgacttcctcccagcctttgccctgatgcgaatttggccgcccgacgccgacagtcagacatctgttgagcaacatcaccccacgttccgtccacggtgtcagatcgccgttggtgggcatgggcaccccaaggtcgtcaaccaattccttataaatattgaccaggcttttcggcagcgggtgaacatttggcgccacgcagaagctcaaacccaccgggtgacccggggtcgggtaggggtcctggccgacaatcagcaccttgatggaatcgaacgggatggtgaacgcgcgcagaatattgtggcttgccggcagccacgggcgcccggcggcgttttccgcacgaagaaaatcgcccatatggtggatggtgggctccacgtcggccaaggcatgggcccaccctggctctaccagttcgctcaatggtttgatcatgactcaccactgtagtcaaacgtgcatatccggtgcatggggcgtggtgtggtggactgatgagttgtttgccgattacactcatgggtagttttgataggaagaaagggcgattatggcacgcgacacgatgacctacgaatcctatgaaccggattccttcgacaatcctccgaagggaccggtgggagttcaccgtggcgctcgttcggtaatggcccgcctctgcccgttcatcgtcgttattctggtggccgcactgtgcggtgtcggggcctgggcatggatttccggagaatacaagaatgtaataggaggatcgtcccagacggcgaccacgtccaagtccgattcgtccagcaaggctgagaccaagaacagcaccaaggatgattcctcgtccacttcgaccgattcgtccaaggactcgacctcggattcggcaaagtccgataccgacagtgacacgacatcctcgaatgagaatcaaaactccgatcagcagtctcagcagtccgaagccaccgcgactgtgaataaggccacgcaggtgcgtgtggtcaacgccacaggaatccaaggatatgcaggtcagcaggccgatgtgctgcagaccgccggttacaccagtgtcgaggcgaccaatccgagcggcacattgccggcttcttccgtggtgtggtatcagaatgagaccgataaggccaccgccgaggatgtggcgaccacgcttggcatttcggctgtggagcaggtgcaagggctcgccgttcccgttacggtggtgttgctcaactagcgttgttgatgcgcccctgatatcggtgagaaatacatcgaaaactgtgagcgttctcacgtctatggaataattcgtaccgaaaatgtgccactgcggttgagattgttccctcgtcactgtacaatcgtcatctagtcgcgaggtagggggagcgcgatgcggttctttctacgttccctataggttttgtgtcgcgacgcccaagggaacaaaggaaagaccagatatggcacaaggtaccgtgaagttcttccttgccaagaaggggttcgggttcatccagccggacgatggcggcgaggacgttttcgtgcactacgcggaaatcaaggacgacggcagcaccaataagttcaaaatgctgtacgaaggcgatcgcgtggagtatacgcccgcttcgtccggcaaaggcacgcaggcaaaggatgttgtcaagctgtcttcgggtgaagcccgctccgagtgagcaacacgcacgcaaggatgtgcattgaaggccctgaccgtttcgacggttggggctttttcatgcccaaagcgcaatcgccgccgatggtgttggcactcggcgggcgcgagtgctaatgtctgggttagcactcggaggtcgagagtgataatcggcagctgacggctggtcgtcacgactcgacgcttgcgagtgataaccggtatacctagccgtttggaggaatacgcaaccatggcaaagatcatctcttatgatgaggaagcccgtcagggcatgctggagggccttgacaagctcgccaacaccgtcaaggtcactctgggcccgaagggccgcaacgtcgtgctcgacaagacctacggcgctccgaccatcaccaacgatggcgtgtccatcgccaaggaaatcgaccttgaagacccgtacgagcgcatcggcgccgagctggtcaaggaagtcgccaagaagaccgacgacgtcgccggtgacggcaccaccactgcaaccgtgcttgctcagtccctggttcacgagggtctgaagaacgtggtcgccggctccaacccgatcgccctgcgtcgcggcatcgagaaggccaccgaggtcatcgtcaaggaactcgtcgctgccgccaaggacgtcgagaccaaggaccagatcgctgctaccgccaccatctccgccgctgaccctgaggtcggcgagaagatcgctgaggctctggacaaggtcggccaggacggcgttgtgaccgttgaagacaacaaccgcttcggcctggacctcgacttcaccgagggcatgcgttttgacaagggctacatcgccccgtacttcgtcaccaacgctgacgaccagaccgcagtgctcgaagatccgtacattctgctgacctccggcaaggtctcatcccagcaggacatcgtgcacgtggccgagctggtcatgaagaccggcaagccgctgctgatcatcgctgaggacgtcgacggcgaagcactgccgaccttgatcctgaacaacatccgtggcaccttcaagtcctgcgccgtcaaggccccgggctttggcgaccgtcgcaaggccatgctgcaggatatggccatcctgaccggtgctcaggttgtctccgacgaactgggcctgaagctcgagtccgtcgacacctccgtgctcggccacgccaagaaggtcatcgtctccaaggacgagaccaccatcgttcagggcgctggctccaaggaagacatcgacgctcgcgtggcccagatccgcgctgagatcgagaacaccgactccgattacgaccgtgagaagctgcaggagcgtctggccaagctggctggcggcgtggctgtcatcaaggtcggcgctgccaccgaggtcgaggccaaggagcgcaagcaccgcatcgaagatgccgtgcgtaacgccaaggccgccatcgaggaaggcctgctgcctggcggtggcgtggccctcgttcaggctgctgccaaagccgagaagaccgaggccgtcacctccctgaccggcgaagaggctaccggtgccgccatcgtgttccgcgccatcgaggccccgatcaagcagatcgccgagaacgccggcgtgtccggtgacgtggtcatcaacaccgtccgctccctgcctgatggcgaaggcttcaacgccgccaccgacacctacgaagacctgctggccgccggtgtgaccgacccggtcaaggtgacccgctccgctctgcagaacgccgcctccatcgctggtctgttcctgaccaccgaggccgtcgttgccaacaagccggagccgaagtctgctgccccggccgccggtgccgacatgggctactgatccgcaaacgatcgctagctgattgagctgaaaggggactccttcgggagtcccctttttgtattctggctcccctctttgaggggagccaagaaactagctggcaaacaggcgcgaagcttggatttcggcgtcagcgtacacggtggaggcttgcgtcagcgagcgttggatggactcgagtgaggcctccatctgctgttgggccgcacgccactgttcggctaccgcggtgaactgggtggccgccgaacctcgccatgcgtcctgcaaggcattgagattggtgtacatgccgcccacggcctgcctgatttgcgagatcgaagtggccactgcggccgaggatgattggattcgctcggaatctacctgatattggggcatcgttgctccttttctagagggttaatggtatgtatggcggccgattgccaataccggccgttaaggtggaggatatgtcaacaacgaatcgggaagacggaaaaacaactattgtggtcctagcttcggagccgtcctattcggccttcgggaatatggtccgaaaatggcttgtttgcgccatttgcgcccttgctgcagtagcgatgaacgcaatgtggataactgcaaatgcctatggggataactcgagcgacagctctgacagctccagcagcagcaccgacagcggcgtgaccatcaccgagaacatcacggatacggaaaatctcctgggctcccatgcggccgaagtcacggatgccatcgccaaaaccgagaaggaaaccggtgtacacgtgcatctgctgtatctttccagtttcaatagtcaacagaaaccgggagactgggcggcaaccgtgatggagtccatgaatcccaagccgaacacagtgatgcttgccgtggcctcgaatgacggcaacctggtggtcgtcgtgtccaagaactccgatacgtggcttctcgataacaaaaccgtcgataagctatccgaagccgcacagcagccgttactggaaaacccgccgagctggtctggcgcggcaacggcaatgatggatcaaatcgtgaaatccaaaaaagcctccacctcatcgtccacggtgatcgtaggcataatcatcatgggtgtggtattggtggcgctggtcatcatcatcgtggtcatggtggtgattcatcggcgcaaggagatcaagaaggattccaaggccgaactccaagatgacattcaggaaacgcccagaagagcgcgacactctaggaagcatgagtaagcctattgaagcatcgattgttgttgtcgacgacgagccgtccatccgagaactgctggtcgcttccctgcacttcgccggattcgaggtaaacaccgccgcttccggttccgaagccattgaggttatcgaaaaagtgcagcctgacctcatcgtgttggacgtcatgctgcctgacatcgatggattcaccgtcacccgtcgcatccgccaggaaggcattaacgcccctgtgctgtttctcaccgctcgtgacgacacccaagacaagatcatgggcctgaccgtcggcggtgacgattacgtcaccaagccgttcagcctcgaggaagtcgtggctcgcatccgcgccattctgcgccgtacccgcgaacaggtggaagacgacccgattattcgcgtcgccgacttggaaatcaacgaggactcccacgacgtgacccgtgcagggcagccggttgacctgagccctaccgaatacaagctgctgcgctacctgatggacaacgagggccgagtactgtccaaggcacagattctcgaccatgtctggcaatacgactggggcggcgacgcagccatcgtcgaatcgtacatctcctacctgcgcaagaaagtcgacggcatcgaggtcgacgacggcgaaggcggcaagcgcaaggtgactccgctgatcgaaaccaagcgcggcatcggatacatgattcgcgaaccgaagaactaatcgcctccatccataacgtatcgcaatctcatgagtatccccgataagcagtcaggcggcgtaccgccgagcagcacgccgaacgccgccccgaacacgaatcccatgcctgcaatgtcgccgttcgccgcccatttccaagagcagcgcgagcgtaagaaaaacatgctgatgcggcatatcgaccgtatctcgttgagcagcaagctggtggcctgcaccatcgccgtgctgctcatcggcgtgtcggtgatttccttctccatccgcgcgttggtgaacaactacatgctgcagaaaaccgacacccagttaagctcgcaaagccaactggtggtcaacaatatcgatctgctgtcaaaaaatgactcatcggggccgaactcgtactttctgcagattcaatacaccgacggaaccaaagacaaagaaggcaatcctctggtcgtgactccgctgatgccgcagatgcaggacggtatcgtatcggtgccgattctgcctacctatggcgataccaatggcatcacgctcggtcaagcattcactacgcaggcggtggccaagcagatcattacggtgcagtccgacagtgcggacaaccagaacgattcggccaacggaaactccaattcctctgacaccatcaccaaggtactggccaaccccactgtcaatgccaaccatgccgccatcgtcacggcgagggcaccatggcgtattctgccggtgaccttccaacaaaacggcaaggaccgggccgtggtgtacatcggcttgtcgctggccgaccagatcgacaccgtcaaaacactcacccgatactgcattgtggtcggcatcgccgtggtgctgctcggcggctccctgtccacgctgatcatccagcacacgatgacgccgctgaagcgcatcgagaagaccgccgcgaaaattgcagccggtgacctgagccaacgtattccttccgcgccggaaaacaccgaggtcggctccctggccgcctcgctgaactccatgctcacccgaatagaatccagtttccatgagcaggaggagaccaccgacaagatgaaacgtttcgtctccgacgccagccatgagctgcgcaccccgttggccgccatccatggctatgcggagctgtataagatgcagcgcgatatgcctggtgccttggagcgtgcggacgagtccattgaacatatcgaacggtccagccagcgcatgactgttcttgttgaggatctgctgtctttggcccgtctcgatgaggggcgcggcatcgatatgaccggcacggtgaaactctcgtcgctggtcaccgacgccgtcgacgatttgcatgcgctcgacccggaccgtgccgttcgccgcatgcggatttccctcgaaccggcgcgcgatttgaaccatcccgccgaattcaaccttgccgaaggcgattggcctgaggtcgtactgcccggtgatgcctctcgactgcgccaggtggtgaccaacatcgtgggcaacatccaccgctacacgcctgccgattcgcccgctgaagccgcgctcggtgtgatgccggccgccatcgatccaagacagctcgctcgcatgcccgccagcgacgcgtcaatgcggcggttcatcgacgccgccgaagtaggtgcctcgatgcagaccggctatcgatacgccgtattgcgtttcgtggaccatggccccggcgtgccgcctgaatcgcgctcgaagattttcgaacgcttctacaccgcggacccatcccgtgcccgcgaaaagggcggtactggtttgggcatggccatcgcgcaatccgtggtcaaagcacatcacggctttatctgcgccaccggcaccgatgggggaggcctgaccttcaccgtggtgctgccgattgagcagatcgccgctcctgagcccaagcagtccaccggcaaaaccaaggacgccaaacagaagacttcttggttcagctctgagcgtaagactcaggcgactcagcccaaagcgtgaggtcaagccctgtgaggtaaactgtaccttcggtttactatttccattgaggattaaggaaggttcgcaatgcccaccggtcgagttcgttggtttgacgcagccaagggttatggcttcatcaccagtgaggaaggcaaggacgtgttcctgccggctcaggccctacccactggcgccaccacgttgcgcaagggggccaaggtggagtattccgtggtggacggccgtcgtgggccgcaggccatggatgttcgcctgatcgcttccgctcccagcttggtcaaggccacccgcccgaaggcggatgacatggccgccatctgcgaggacctcatcaagatgcttgatgcggccggcaatacgttgcgccgtcaccgttacccatctgctgccgacagcaaaaagctggccacgttgctgcgtgcggtggcggatcaattcgatgtacaggactgatctgatctatgactgataccaccgaaaccatcgtgacaccggaccctcacgccatcgcgcgcgccgtgctgctcgaagtggccgacgagagcgatcaggtgggggatttcgttacctcatatgatcttgaggatcacgtcactgacttccgcttcgccgcgaatatccgtggctacgaaggatggcaatggtcggtgacgctgtatcacgacgaggagatcgactcctggaccgtcaacgaatcctccttgatccccactgagggcgcgttgatgccgcccaagtggattccttggaaggatcgcctcgagcccacggatctggctcccaccgattcgatcggtaccgatccggatgacgagcgcatcgaggaaggcgaagtcgaggaatcctcgctgcaggatgtcaacgacgccgtcgagaccttccgactgacccgccgtcacgtgctgacctcgttgggtcgtgcgcaggctgccaagcgctggtatgaaggtccgcgaggccccaaagcattgagcaccaaaaccgctgaaggcaacctgtgctccacctgtggtttcttcgtgccgctcgcgggcgaactcgaccgtatgttcggcgtgtgcgccaacaagtggagtccggatgacggccgcgtggtttccttggaccacggctgcggcgagcattccgaaatcgaacctcccgagccaagccagctgtgggtgcagtccaagcctgctttcgacgatctgcatatcgacgtggtggccaaccgtccgcgcaagcaggagccggctgcccaggacgaggccgaaggcgaaaccgacaagacaggcgagcctgccggcgatgatatcgaagcacagaagactgttgacgggaacgccgtcgatactgagcccgctgaggggacggcaggtgacgggacctcgcaatcccagtctgccggtgatgagtccgttgcacagaacgcatccgattccgttgtggatgttgatgcagctgattccagcgacgagtccaagtctgatgctgacgacgaggccaccgaagaggatatcctcaacaacaccgttgccgatgatgatgaggatgatgagatggacgacgaagaggataacgttcgtcatacagacgatgtgactcctgaactcgaaaccgtcatcgatctcatcgagcagctgcgccagaacagggcggacgaagaataaactccgaattccgcgaaaagtagatggtgatggggttgcaggaataaggaattcctccctgcaaacccatcaccgaggcgtgcgttagcactccatgccgatttcggtgaatcagtgcaccacggtcaccgtgcactcggcgaagttcacgatctggcgggacaccgatcccaggaagtgcgcgtccagcccggacaggccacgcgagccgaccaccagatggctggcgtaccgcgaggccgcgatcagacctttggatgcgggaatatggaaggcgtttgtgctgaccttgacgccatcgggaatctcggctttggccatcagctcggcgagaatctcctcggcgcggcgttgaccgaccttcaccggtgccacggcgttctcatagcccggaataacgcccaaatccttgagctgccagcagaacatcacatgcagcggcgcgtcgtgcagtcgtgcttcttccagtgcgaaatcgaacgcgcggcgggaagtctcggaaccatccacaccaaccaccaccgggcggcgagcctcctcgaccaccggctgaggctgcgtgtagtgaacgggcttgtctcccggagtcagggcgttggcaatggcgtcggtcacggtctcatcctcgctgccggcgatgcgcaccacggtcaccggcacttcggcggcctcggccagcgaagcggacagggaccccatgaaccagcgggccatacggctcagcgagcggcggccgaccacgatctgctgcgaatcatggccgatctgcagcagggccgaagtgccggaggccttcaccgaggtgagcttcagattcgccggatcgaagtcgatgcctgcagcggccttgtcgacccacacacgcagctcgttggcaatatcgtggcggaccttggcccaggcctcgtcactgtccggttcggatcccatatcccaggaatgcgtccagccaaacacggcgttgacgctttggccggttaacgaggcctcctcaagcgcccacttcagcgcggcaaaggattcatcggaaccatccacaccgacaacgatgtcgggcttggttgcagcttcactcatttcgagcctccttgtaatcgactacgggtgaatctaagaaccagcatatcgttttcttctcctctcacggcgcaattcgtggaatctcatgaataaacgtcatcgtgaatcggtagagtaggacggaatgtcaattgaggaaggacaagcatgttcgaacggtttaccgaccgtgcacggcgcgtgatcgtgttggcgcaggaagaggcgagggcccttcagcacaactacatcggcaccgaacacctgctgctcggcctgatccgcgaaggtgagggtgtagccgccaaggcactcgcctcgaagggcgtggagctggatgccacccgcaagcaggttgaagaaatgatcggcaagggcaacgcggctccgaacgggcacatcccctttactccgcacgccaagcaggtgttggagttttcgctgcgtgaagccctgcagctgggccacagctacatcggcaccgagcacatcctgctcggcctgattcgcgaaggcgaaggcgtgggcacccaggtgctcatcaagatggacgtcgatctgggcgagttgcgtagcgcgaccatcgatatgattcgcggcaactccggcaccggcaccggtgacggcaagggcgacttggccaacgccggcggcgtgacggacaagcagaacaagtccggttccgccatcctcgatcagttcggccgcaacctgaccgccgaagccgctgaaggcaagctggacccggtcatcggccgtaccaacgagattgagcgcgttatggtcgtgctttcccgccgcaccaagaacaacccggtgctgatcggcgagcccggcgtgggcaagaccgctgtggtcgaaggcttggcccagaagatccaagccggcgacgtgccggaaaccctgaagggcaagcaggtctactcgctggacctcggttccatggtggccggctcccgctaccgtggtgatttcgaggagcgcctgaagaaggtgctgaaggaaatcaagactcgtggcgacatcgtgctgttcatcgacgagattcacaccatcgtgggcgccggctcggctgacggcgcgctgggtgcctccgacatgttgaagccgatgctggcccgtggcgagctccagaccattggtgccaccaccaccgacgagtaccgcaagtacatcgagaaggacgcggctctggaacgccgtttccagccgattcaggtgcacgagccgaccatcgccgagaccatcgagatcctgaagggcctgcgttcccgttacgagaaccaccaccacgtgaccatcaccgatggcgcgctgcagtctgccgcagagctgtccagccggtacatccaggaccgtaacctgcctgacaaggccatcgacctgatcgatgaggccggtgcacgcctgcgcatcaagcgcctgaccgccccgcctgagctcaaggaactcgacgagaagatcgccaagatcgccgccgacaaggacgaggccatcaagggccaggacttcgagaaggccgccgaactgcgcgacaagcaggagaagctggaagccgatcgcaagcagaaggaagactcctggcgcgaaggcgagtccgacgtcaagatggtcgtggacgaggacgtgatcgccgaggtcatcagctccaccaccggtatcccggtgttcaagctgactcaggccgagtccaagaaactgctcaacatggaagccgaactgcacaagcgcatcatcggccaggacgaggcggtttccgccctgtcccgctctatccgccgtactcgcgtgggtctgaaggacccgaagcgcccgtccggttcgttcatcttcgccggccccaccggcgtcggcaagaccgagctggccaagacgctcgccgaattcctgttcgacgatgaggacgcgctgattcgcgtggatatgtccgagttctccgagaagtacgcggcttcgcgactcttcggtgcgcctccgggatacgtcggctacgaggaaggcggcgagctcaccgaaaaggtgcgccgcaagccgttctccgtggtgctgttcgacgagatcgaaaaggctcatccggacatcttcaacacgttgctgcaggtgctcgatgacggccacctgaccgacggtcagggccgcaaggtggactttaagaacaccatcatcatcctgaccaccaacctcggtacgcgagacatcgccaaggccgccaacacgggcttcaacttgggtgccaacaacgagtccagctaccagcgcatgaaggaccaggtcagctccgaattgaagcagcagttccgcccggagttcctgaaccgtctggacgacatcatcgtcttcaagcagctcaccgagccgcaggtgcgccagatcgtggatctggacgtcaagcagctcaacgaccgcctgttcgaccgtcatatgtcgctcgaactcaccgacgccgccaaggacctgctcgcgcagaagggcttcgacccgctgctcggtgcccgtccgctgcgccgcgtgattcagcgcgacatcgaggacgccatctccgagaagatcctgatgggcgatctcgaagacggtcagcgcgtgattgtggatgcggaaggcgagggtatcctcggcgaattcaccttcaagggtgaggagttcgaggagccggccgccgccgataagcccgccgaagacggtgccgccactgatggcgagactccagccgacgccactccggccactgagccggccgaatccgctcccgccgattccggtgacgctccgcaggagtagtccgtttcgatagcgtagctagcgcataccagcaaagctccccttgacaggggagctgtcagcgaagctgactgaggggtagacctgcgcacacatgatgtgcacgtttgtggtctacccctcagttgcctctggcgacagctcccctgtcaaggggagctactgtttgtgtcggattattacagcagggcgagtccggtgtcgatggtctcctcgcgggtaaacagcgtgcggccggcgcgcaccgaacgcaataccgagcagcgctcatacacggcgttgaacacgctatcggcgtccagcacaatgaagtttgctggcttgcccgtttccaagccgtacatatcgcgcaggcccaacgtagtggcaccgttgacggtcaggaacttcaacgcatcgtcgatttcttcaaagctcatcatctgtgccaaatgcagcacataatcaagaatgagcatcatattgccattgcccaacgggtaccacgggtcctgcattgaatcctggcccaatgacacattgacacccgcctcagtgagctccttgactcgcgtgatgccacggcgcttggggaaggtatcctgacggccctgcaaatacaggttctcggtgggggcgcaggcgaagttgatatgcgccgccttaagcagcttggtcaggtggaagaagtaggcgttgtccgccgatcccagcgaacaggtgtggctggcggtgaccttcgggccaatgccagccttatatgccagcgccgaaagcagctccacgtaacgggaattcggatcatccgtctcatcgcaatgcacgtcgatgagcttgtcgtatttcgaagccaactcaactaccgtgtgcatggaatgctcgccaaactcacggcactgttcgaaatgggggatgccgcccacgcagtcggcacccatcttgagtccttcctccaccagctcggcacccgattcgccatgcgggccctcgtaggagtacatgccctcctgcgggaagctgacgatctggagagtgaccgtatccttcaattcctccttaagctccagcagcgcctttaacgaggtcaggttcgggtcggtcacatcggcatgggatcgaatgagctgcacgccatgcagcatttctttcttaatgccgattttcgcgcgctgcttgatctcgtcgaccgtcaagtcggacttggtctcactccatcgctggatgccctcaaacaaggttccgctttcattcaccgcaccgggcttgcgggccgtgaatacgtaatcaaggtgcagatgcgtatcgcagaacggtgggcagacaagtttgccgcccagatcgaccacctcaatggccgccagatcaccaccctgagcctcatattgttgcgcgagtccggggccgaatgcggtgaacacaccatccgtgacgagaatgtcctgcaatggcagggtgcttgcagccgtgcttccgggttctccggtggcgatatgtgcgttggtgaacagtgtggtagtcatcgtcgctccttcaactggtgtgttgccgaacggttacgtgaaccgactgcccgcgtaaccaactgaggttattgtcaacagcacgctttgcggtgaggttaaccggaacgaccggtgttccgcgggggaatggacagattgtatgactgtatcgattcgcagtgtgcttcataacacgcagttcaaacgagccgatcctgtggtggaggtcgaaggcaaagacctcgatacgccagtgcgatgggtgttcaccaacgagcgagaggatgtctccagcttcctttcgggcggtgagatgctgattatcgagggcaacgctctgctcgccgccgattggcacggcacgctaggacaatatgtagcaagcctggcacaggctggtgtcgccgctctggtggtcgaactggtggagggtgtggcgcggatgccggacgaactggtgtctgcggccaggctgcatgggttgacgttgattggtctgaaatctcgcgtaccttttgtcgacatctgtcagagcgtcaataccgctatcgtgcacgaacagatgcacttgcaattggaggtggacacaatgtccacttcattacgtgagggattgtcccgtaccggcaatatcgaggctgtggccgaaaccattgcgtcgctgttcggcgaaagcgtcgccattttcgatggtgacggtctgttggccgctcgagcgggtcgtgcgttcgatgccggcaacgaatcgagcgccgtcatcgcccttgaaagtcgctcccggccggtgggagcattggagatcacgcaacgcaccatgacttccgacgccacgatgcgtcgggccatcgccaccatcgtgtctccggtggccgccctttatattgacggcggtgcgcgcatgggcatgatgcatcatctgagtatggggccggccgacggcgtgcacgtcaatacatttgaggcgcaggaagcgcatgcgatgctcgaagcgctgggttttgccggatcatgcatctatatgccattcgcttttcggttcagatcggtggtggaaggcatcaaccatgtatcgacgatggtcgaacggttcgaagaactgtcgggatgcgccgtctcctgcatgctggaaggtgacttgatggtcggatggtgctccaccaccgattcctcagacggtgcggccgcattcggacgccattgcatggatgcgcttgccgtactggaaggcgacggtatatacgtggtgcatggccgagtggcattggacacggtgacgctggtcgacgggttcgcggtattgcgtgacatcgccaatcatgaaccggcatacgggcgagtcgtaagtaccatgtccgcactcgtcgaccgtttcgtcgcatcctctgatatggacaaggcgatgcgcatgctcgtggtgcagaccatcggattcgaggtcgccgcctccccgctgttgctggacacactgtgcgcctgcttcgacaacctcgacagcaaaaccggcgcgtgcgagcaattgggtatcagacggcaaaccctgtacaaccgactggacaaagtgacacaaatggtcggcgtcgactataacgacaaaccgaactgggtgatgctgctattcgccgccaaactcacgaaatcatggcaagaacagcatggtgaataatacggcagtgccactgggcaacctgtccacttctacgccgaactggttaatcgacgattcacgtttcagcaaatactcaagggcatagtcgaggctatcgcggcgctggtcgacctgctgcgaaacggattcccacttgaatctcattcagtcacacgaacagcacatccttgaaaggacggtgacatcatgagttccgcaacgattactacatctgcacgactgatgaattccaccccgcaaactgaagaacaggccatggtcagaaaagtcgcggtatcttccttcctcggcaacttcatcgagtggttcgactacgcctcctattcgtacttcgccaccactatcgccctggtgttcttcccaaccgacaatcacaccgtcgccatgctgcagaccttcggcgtgttcgcgctatccttcatcctgcgtccaatcggcgcactgttctggggtagctatggagataagaaaggccgtaaagccgcactggcccactcgattatgttcatgtccggtgcgagcttcctgatcggctgcctgccgtcttactcggtgattggcgttggcgcgccgattctgcttctactgctgcgcatggtgcagggcttctccgcctccggtgaatatgccggtgcggccacgttcctcggcgaatatgcgcccacttcaaagcgcggcatctactgctcgctgattccggcttccaccgccatcggtctgctcgccggctccacgctggccacgctgatgaccgccaacatgaactccagcgcgatggtcggttggggatggcgtgtgccgttcctgctggccggcccgctcggtctgattgtgctgtacatccgcgccaagctcgccgattcccccgtctaccagtcgatgaacgatgcgcttgagtccaagggcgccgcctccgccgacggtcaaatcgctgccaagagcggcatgttcgccccgctcgccgagttgttccacaaccatctcaaggctctgatcatcagcttcggagcctgcgtgctgaacgcggtcggcttctacaccgtgctcacctacctgccgacctatctgtctgacaccgtcggcatggacgccccccagtccggcaccatcaccaccatctgcctggtcgcctacgtgttcatggtgttcggcatgggccacatctccgacaaattcggccgcaagaaggtgctcatcggcgcttgcgtggcgttcatcgtcctcaccgttcctgccttcctcatcctcaacacctcccagttctggcccgtgctgctggttgagctggcaatgtgcgccaccctgaccgccaacgacggtaccctgtccagctacctgaccgagacgttccccacctccgtgcgcttcaccggattcgcgttcagcttcaatctggccaacgccatcttcggtggtacggcctcgttcatcgccactggcctgattgccctgaccggttcgtccatcgccccggcctggtacatggtgggcgttgcggccatcgccttggtcgcgatgatcctctcccacgaaaacaccgacaaggatctgaatcacatctgatctcctcagctccggctccttccccgagggaaccgggcgtattcatcgaccatccaatccaccaccaacctaaaggagtactgcaatgggtagcaaccgccgtatggaccacatgacctggccggaattcaaggaggcgaagactcgtcccgtcatcgtgccgatcggttcgaccgaacagcacggccagcatctgcccatcggcaccgacgcggtactcgccacgcgggtcgccgaagatctggcggaacgcatcgacggcaccgtgctgcccaccctgagctacggatacaagtccaagccgctctccggtggcgggccgctgttcccgggcactatcgacatgaacggcgtgacagtgatcaaccaaatgcacgacgtgctgagcgaactcatcgccgatggcttcaccaagatcgtcgtcatgaacgcgcattttgaaaacgaggcgttcatcgtcgaggccatcgacctggtcacccgcgaaaccgggggagtggccaccatcgtggaaaccaattggtgggacccggttccgcagtcggttatcgacaaggtattcgatggattggtgttccccggctgggcattggagcatgcggccgtcaccgaaacttcgttgatgctccactatgcgccggaactggtgcacatggaccgtatggtcgaggaagccggtgccacggcgaaatcctatgtccgctaccctgtgcgccaaggtgacgttcccgctcacggcggactcgccaatccggccggctcgagcgccgaacgcggccgtctgattgccgaggcgtgcgtggatgcggtagctgagatctgcgtcgaggaatttgccgagtaatctcctcttgctgacgcattcgtagtgactcgggttgcaaaggcctgaccctgatagtacggggtcaggcctttcccatcccaagacgccgctaagaattcacctgagagtcgccttcctaggcatggccgttcaatcgacgattctagcgtgactggtgtgagcaggaatatgaagaaccggcggtggaccggcaagcgatcgtggatcgtttttggtgtagtagcgcttatccttacggctctggtggttccttatgcttgtgctggaaccacgggagccgttcctttttccggcgataatccatcttccggcacccgtacggtgaccatcgccgacatcactgattttcacgggcatatcgaacgtggtgcggacaacgccaccgccttcaccgtggccgacagccataatcccggcaatatgatcccggtatcgaccggcgatttggtgggaggctccccgtatgagtcggcggtggagaaggaccaacccacgctggatatggccaaagcgtggggattgacgatttcggcgataggcaaccatgagttcgaccgcggtgtcgccgatttcaacaatcgtatcgctgatcccagcaacggcatcgactggctgtgcgccaacgcgtctgccgccaataagtcgcctgacggactgctgagccacgtacgtgactctacgattcgaacggtgaacggcaagcggatcggtttcgtgggcgcccttactgatgcgctcggctcggtagccactccgcagatcactcgtgatgccgatcttgacgaacgggcggtggacgcgatcaatcgcgtggcccgtgaactcaagcgctccggaaaggtggatgcggtggtggccttgctgcacgccgatgcctcagccgccgccgatattgggcgagatgttgatgtggtatacaccggtcacagtcacgcgatcaagcacggtacgaccgcgggtggcgcgcctatttacgaggcgggcagcttcgggcggaacatggccgtgcaggatttgatcatcaccggtgccgggcgtcgcgccacggtgcgagtggccgacgttgacctcggcaatggcaccagccatacggcggttgacggcgtgctgggcgtggaagggcttaatgcgcatccggcgcaagccgcttggatgtctgccggtgctgaggagaacgatgaggtatcgcgcgctcagcatatttaccaggcggcggcaacatattcgaatcatgccggcagcgcggtgattggcatcttggcctccggcgtgaatttcgacaaacaaggttcggataagcacgggaatacggtcggtgtgctggtggcggacgcgaaccgagagtcaatcatgaagcatgtgtatgccgggaatcgcttgccggtaatcggattttcgaataatggcagtctgcggactccacggcttgatatgaatggcgatggcaaagtcaccgtgcgcgaggtggatagtctcatggccttgcagttcaaggccgcgcatgagacgctcaccgggcgcgatgtgaagagagtgctcgccgagcaatttcgccgtgacgatgggcgactggagcggcgctggctcggcatctcctcgaacgtgacgtatcggtatgccgaatgcggtacggctggtgagagcggcaatgccgatgccggcgttgataccaacgctgacgctgatgagtgtgctgccgacgaacatgcggcggttcgtatcgtgaacctcgccgttgacggccgaccgattgcggacgatgacctggtgattatcgcgtccaattcatatctgcttcagggcggcgacagttaccccgccttccgtgccggaaccaattacggcgagctggatatgccatacagccagccgttgcatgaatatctggccgcacatcaagggctcacggcagttgttgcagtaccggtagggactcaggcgtaagacaccaattgctgggtgactgaggaactatggggtgaagttatgagtatagggcaggagaaaacggcataaatatgacgacgctcccctcgctgaggggagctgtcgccgtaggcgactgaggggagcttgcggtataaccgtaaactcccctcagtcagccttgctgccagctcccctctctgaggggcacctggcgagacccttacttgatggcgttcaaccactgctccttggtggccttctcggcttcgagcttggccttcttcttcgggtcggattcggccgcgatctcggcgtcgagctcggcgagctgggcgttgagctgctcctcgaagctggacttgcgggcgtcggcctccggatcggtctgcttccaagcggcatcctcgatggccttgatctgcttgtcaacggcgtcgagacggttctcgatgcggcgcatatcgtcacgcggcacgtaaccgatctgatcccactcttcctgaatcttggccagctcctggcgggccttcttggcctcggcgtcggtcttcaccggcaccagagcctcggccttgaccagcagagcctccttggcagccagattctccttctcggaggagttgatctgatcgcgatcggcctgacgagcgttgaagaaggtgtcggcggcttcgcggaacttggcccacagctcgtcgtcctcgttacggccagcgcggccggccttcttccaacggtccatcagatcgttgaacttgcgggaagtctcaccccaagcggtggaatccttgagctcattggcctcggcgataatcgcttccttggcttccttggcggccgtgcgctcgttgtcgcgagcctgagcccacttgcggcgagcctggttgaaggtggtacgggcggcggagaagcgcttccacagcgcctcggcctccggcttgtcgatgcgcacggtggtgcgctggtggttctgccactcgtcgaacaggttacggaacttgtcggcggtggagcgccagttggtgttgtcgcccagagaagcggccagtgcttcagccttctcgacaatggcggtgcgctcggcaacggccctggcctgagcggccttgcgtgcctcggcgatttcggtcttcttggcctcgccggcggccttcagctcctcgtactgggccttgagtgcggcaagatcgcccacgacggccggctcggaggtttcttcacccaagagcttcacggattcgtcgatttcacgggccttgatgttcggggaagccagacgggtggccaacagatcgagcttggccttgagatccaggaaacgacgggcgtacagtgccaacgcctcttccttggagacatccgggaactggcccacctcgcgctcggcgtcgccatccttgacgaagacggtgccgttgtcatccacgcggccgaaggcctcggcggccttgacatcagcctcggaataggcggcggtggcggcggccggggcggcagcgcgcggcttggtcgccggagtcttcttggcgaaggcggcgggggagggcgcgtgcggtttcggcatggaagcgggggacggagtcggcgccggcgtggccgcgctggcctcgggtgcgggtgtcgttgcctgctcttcgggcgcagcggtgtttacgggttcggtgacagtttcgtcggccatggccagctccttaaagcgtagaatgcataagcgggagcgtctcccatcccgggcgaaccaggaagttttgacgcaaccctcacctattatattgatttcgtggctaaaggtgcatcaatatcaggattcccggagtggctcccctccgaacgtgttgtggagcagcgtgttatcgatacgcttcgtaaggtttttgagctcaacggcttcatcggcattgagacgcgagcggtggaaaccggcgcttctttgttgaaaaaaggcgagaccagcaaggagatctacctgctgagccgtttgcaggaggtcggtcatgaatccgacactccgattgaagagcggttgggcctgcatttcgatctgaccgtgccgctgagccggtatgtggtcgagcactcgggtgcgttggcgttcccgttcaagcgctggcagattcagaaggtgtggcgtggcgagcgtccgcaggaaggccgcttccgcgagttcgtgcaggccgatatcgacgtgatcggtgccggcgacctgcccgaccactatgaagtggaactgccgctggtcatggtctccgcgctggaagagctgcgcgcgtatggcctccccaaggccaccgtgcacgccaataaccgcaagttgtctgaaggcttctaccgcggccttggcctgacggacgtcgaaggcgtgctgcgcgagatcgacaagctcgacaagatcggtgccgatgaggtggcccgactgctcaccgagacctgcggcgccaccgaagcacaggcacgcgcctgcctcgaattggccgagctcaacgcctccgacggtgccgagcttgccgccaagttcgatgcgctgtgcgaggctcacggcatcgtcaaggattccgaggcctacacgctggctcgtcagggactcgataccctggccatgatcgtcgacgaagccgccgtcatccgccccggttccgtcatcgccgacctgaagatcgcccgcggtctcgactactacaccggttccgtctacgagaccttcctcgacggtgccgcatcactcggctccatctgctccggtggccgttacgacaatctcgcctcccagggcaaccgcaagtacccgggcgtgggcctgtccatcggcctgagccgactggtcagctacatgctgcacaccgccggcgctcacgccaaccgtgtcagcccggccgccgtgctggtcgctgtgtggaatgaagaggaccgcccggccgccaaccgtattgcgaaccaactgcgtgcgcgcggcatcgccaccgacgtggcacccaccgcggccaagctcggcaagcagatcaagtacgcggacaaactcggcattccgtacgtgtggttcccggccaccgctgccgaaggtgcggaaggcgcagagcccgctggcgacgaggtcaagaacatcgtcacgggcgagcaggttgccgccgattgcacgtcgtgggagccggatactgtggttgcccagcaaaccgtcgaaatctgacgtattcgcgcgaaaaatcgaggagaaacaagacaatgagccagacggcttacagaacacatcatgccactgaagtgaccgaggccctggtcggccagaaggtcacccttgccggttgggttgaccgacgccgtgatcacggtggcgtggccttcatcgaccttcgtgattcgaccggtctcgtgcaggtcgtcatttacgacgaggatatggcccgcccgctgcgcagcgaattcgtgattcagattaccggcgaagtgcgcctgcgcccggatggcaacgaaaacacccatctggccaccggcaagatcgaggttgtggccgagaccatcgagatcctcgccaagtccgacgctctgccgttccaggtttccaccgctctcgagaatgagtccgagaacaagctgccgggcgaggacgtgcgtctgaagtaccgttacctcgacctacgccgtccgtccatgcaacacaatctgaagctgcgttccgacatggctaaggccgcccgccacgcgctggaagacatggacttcaccgaggtcgagaccccgaccttcatcaagtccaccccggaaggcgcccgcgacttcgtggtgccggcccgtctggtgcccggttcctggtacgccctgccgcagtccccgcagctcctcaagcagctgctcatggtctccggcgtcgaacgctactaccagctcgcccgctgctaccgtgacgaggacttccgcgccgaccgtcagcccgagttcacccagctcgatatggagatggcctacgtggaccaggaagatgtgatggccatgactgagaaggtcatcgccgccatctggaagtccgccggctatgaggtccagctgccgctgccgcgcatcacctggaaggatgcgatggacaagtacggctccgacaagccggacctgcgcttcggcaacccgctggtggaactgaccgagtacttcaagaacacgccgttccgcgtgttccaggccccgtacgtgggtgccgtggtcttcaagggcggtgccgccacgccgcgtcgtcagttcgacgcttggcaggattgggctcgtcagcgtggcgccaagggccttgcctacgtggtcttcggtgagaacggcgagctcaagggccccgtcgccaagaacctgtccgatgaggaacgtgccggtctgcgcgaggccgtcggcgccgaggagggtgacgccgtcttcttcgccgccggttctcgcgagtccgcccagctgctgctgggtgccgtgcgtgtggagctcgcctcccgcgaaggcctgctggatccgaagaagttcgctttcacttgggtcgtggacttcccgctgttcaagcccaccgacgatccggatgatgacgatgtggctgtcggccactccaagtggacctccatgcatcatccgttcaccatgccgagcaaggattggatcgacaagttcgacaaggatcccgaacacgccatgtccgactcctacgacatcgtctgcaacggcgaggagatgggcggcggttccgttcgtatccatcgtgacgacatccaagcccgtgtgctcgatgtgctgggcatcaccaaggaagaggccgacgagaagttcggcttcctgcttgaggcattcaagtacggcgctccgcctcacgcgggtctggccctcggttgggaccgcaccgtgtccatcctggccggtgcagactccatccgcgacgtcatcgccttcccgaaggccggcggcggccgcgacccgctgaccggtgctccggccccgatttccgacgagcagcgcgccgagactggcgtcgactacgacccggacgccgacgaaaactaatctacggagcgtataccgcctttcctcagcactcgacgtacttcagtgcgccttcggcttcggacggcggtctccgcacgcgtagattaattttcgaggagtaatgctccggtgctattagccgcaaatggcccttggaataattccaagggccatttgctttttgcgggtggggcccaatgtgccaaatacctgccaaggggtgccaaatactccgcccgatggcacctccgccatgcggcaaacctcgcaccatgcggtgtcccccttggcgtttgccgattatccttccatggggcggtaacttcctcatggggcggtaaacaacccatggggcggtgaaaaccccatggggcggtaggtcaaaatggcttaattccgcggtttcacaatttcttcaaaccgccccatgggcaaattaccgcctcatgggggaattgccgctccatgagaagtaatcgcaactccgtatttgatcaatgttgtgatgctttgttgtgttttgcttgtttccgcctcctgtattcccctttgcgcgcattgatggtaaggctgccgtctattaatacccggcatgaaggttgaggacggccaggaagcggtatttgcatcgcggtggcaacctcttgtgcgaaggcacgttgtttggcggtgttccacaggtcatcggcgaacacctcgatgacgatccagcccaattgccgcagacgtcgacgtttttgctggtcccgcacatattgtttgcggaagcgacggtgatgatcgccatcatattcaatagcgactttgtattgtggataagccatgtcaacggtgtaggtgtatccgttctctgaatcggtaatgccatattgtgtttgcggtatgggcaggccgaaaagcataagcgccaagcgtgtacgagtttcctgaacggaatccgatggttttacgagcttcagcgccgcctcacaacgcgcacggccaataacgcggtgaaaggccgttagtcgttgagtgaattgttcaatggcatatccataacgtctgatgagcgcttcagccagcaccactaattcagtgaggttgagatattgggcaaactgtatccacgcatccatgggatgcatgcaggttacgccgtttgagaaagcgatactgttgaactttgcattccatatgcgatagtcgacattgtccaatgaagagcgggtccccttgctcctcaccgtcacataaaaatccttctgcggcaacgtgctgtgcctcggcaactccacgccgcataattccaatgcggtatacagcgagaaacacaacgtgcgtttcgtgcgcactttgcccagcagattccaacaggccgtgttcttggccgtggctttggcgtcaagatctttgcgcagatagttgttgatttcgccattgtgcggcacttcgctgtatccgttcatgcgccgagcgtagcgcattccacggtggcacaggggcaaaaccgaaaaatggggataacttaagcggcgcgaaccggttatccaccggcatatcgtgtgccgcgcccggttatccaccgcgcttcgggagtgtcgtccaccgtataacagcactcatcgtgtgcgaacagctagccacgctcaaaatgcctagcgcatttatacgaatacgacatgggaaacggcgagaccagccccacacaatacaaagtgaccgccagccatgcgcccgactgcggcatacacggcagcaacgccaacgacaccaaggccaaacatggaatcagcagataggacaacacgtgcccgctttgccgtcgcagcaacgtctcagccaccacgcagcaggcaatcagcgcacagcagacgccgagcgatgcgcgactcagcgagaatgtatgccgatgcccaatgccgccttcacgatgtctgatgcggaaatgagacatcgactgagcaactgtgtggacatactgtgaacacgttggaaacgtcggtgtgctatcctcccactcatgtctgaaacgaacaatgaaacagcagtgcgttcgcgcgcgacaagcacaacatcaccgagcaaggccaaattgaccccgctggtttccggcaaagaggacccgaaccgtccgctagtcgaactgacccacgtcgaaaagcacttcggtgctttgcacgttctcaaggacatcaacctgaccgtcgccaagggtgaggtgctggtggtcgtgggcccgtccggctcaggcaagtccacgatgtgccgcaccatcaatcgcctcgagaccatcgattccggcgacatccgcatcgacggcaagcccctgccacaggaaggcaaggagctcgcgaacctcagggccgaagttggcatggtgttccagtcgttcaacctgttcgccaacaaaaccattcttgaaaacgtgacgctggccctcatcaaggtgcgtcacatggacaagaaggaagccgagcaactggccatggacctgctcgcccgcgtgggcgtcgactcccaggccagcaagatgccctcccagctctccggtggccagcagcagcgtgtggccatcgcccgcgcgctcgccatgcgccccaaggtcatgctgttcgacgagcccacttccgcactcgacccggaaatggtcaacgaagtgctcgacgtgatggtcgaactcgcgcatgaaggcatgacgatgatctgcgtgacccacgagatgggtttcgcgcgcaaggccgccgaccgcatcgtcttcatggcggacggccagattctcgaagagaacacgcccgacgagttcttcgagcatccgcagaccgaccgtgccaaggacttcctctcgaagatcctcacccactgacgaacccactgaaagacgggtacgcaatccaatgacattcaccaatacgttcaaacggaaggcttgccgcgtgatcgccgcgctcgccgccgtggcctgcacaatgtcgctggcagcctgcggcgcggacgaaaccggcaagatccgcatcggcatcaaattcgaccagcctggcctgggcttcaagaagtccggcacctacgtgggcttcgacgtggacgtggccaaatacgtcgccaagaaactcggctattccgaagaccagatcatctggaaggaagccccctccaagcagcgtgaggccatgattcagaacggcgacgtggacatgatcctcgccacctactccatcaccgacgagcgcaagaaggccgtctccttcgctggcccgtacttcgtggccggacaggatctgctcgtgcgcaaggacgacaactccatcaacggccccgaagacctgaacggcaagcgcctatgctccgtcaccggttcgacctcggccgccaccgtcaaggagaagttcgcctccgaagtccagctcatggaacagcccggttacgccgaatgcgccaccgccctgttctccggcatcgtggacgcggtaaccaccgatgacatcatcctggccggcctggcctccgcctcgcgcggcaagctcaaggtggttggcaaaccgttcacgcaggaatactacggcgtgggcatcaagaagggcgatacgcagctggccaccaaaatcaacaacgccatcgtggacatgattcaggacggctcgtgggagaacgccatcagcgataacaccaagggcaccaactacacgcccgacgtacgctacaacccgcccatcccggacgaaggagaggaggcctgatgagcggattcctggaactcttcagccagtatgacgtgctcggcgcgtttctggtcaatatcgaactgaccttgtggtccgccctgttctccctgatcctcggcgtgatccttgtggtgatgcgcatctcgccgatttcctcactcagggccgtggccggtgcgtatgtggaactgttcaagaacctgccgctgaccatcatcatggtgttcatggtgctgggtgcctacgcgcagctgaagctcagcttctccgacaccttcaccacgaacttcttctggctcgcggtcaccggcctgagcctgtacacggcggcgttcgtgtgcgaatctctgcgttcgggcatcaacaccgtgccgattggccaggccgaggccgcacgagcgctgggcttgggcttcatgcagtccgccaccgagatcattctgccgcaggccttccgaggctccgtggcaccgctcggcaacacgctgatcgccctgctcaagaactccaccgtggccgccgccgcatccgtggccaccgaaacatcctcgctgatgagcgagatgatcgaattccgtcccgacgtgatcatccaaatcttcctgatcttcgcgctcggctacgtgatcctgatcatccccatcggcatgctcaccacgtacctgtccaacaaactcgccgtaaggaggtgacggatatggccgatacttcgaattccgtgctgttcgacgcgcccggtcccaagggccggcgcaccattcgcatcgtcaactggatcgcgggcattctgttcgcggtggtgctcgtgcttatcctcatgcgcctgcacaacccgccggacggcgagaaccagctcagctgggagctgtggaagcccgccgtcgaacgagaggcgtggaccgacttctacctgcccggactgtggatgaccatcaaggccaccatcgtggccgtggtgggtgccgtggtgttcggcctggtgttcggcgtgggccgactgctgccgaacccgttggtacgtggcgtctccgccgtgatcgtcgagttctgccgtgcggttcccgtgctgctgctcatgatcttcttctggcgatggttcgcgttcgcgggcctgcccagcccgtcctattgggccgtggtgctggccttggtgctgtacaacggttcggtggtcgccgaactggtgcgctccggcgtcggcaatctgccgggcggccagcgtgaggcctcgctcgctttgggcctgaccgaaacgcagtcgctgatggagatcgaggtgccgcaggccgtctacgccatgctgccggccgccgtcacccagctggtcgtggtgttgaaggataccgccctaggctcgatcatcatgtataccgacctgctgcaggaatcgcgccgactcggctcgatgtacttcaacatcctgcagacgctggtcatggccgcggtgatttacttcatcgcctgctggctgttgtcgaggctcgccgaatggctgccctcgcgcatgcagcagcgtacggccgcacccgccgaacccgagccgctggcgccgatcgccgccggcgacccgtccaatgtcaaccagatcgctgtggccaaggaggtcgaagagctgccgctgggcggtacgccgcgcaaataccatgtgcatcaccgtggcaccaacgcctcgattcgcaactggcggcgcacccgctacgaacagggatatgacgccacccagcccgagtcacaggttgacccggaaaccggcgaattccaggagtctcaaaagcctgaggacaagccagaggcctgacagtcagctcaatcgccgctaagccggcacgaagaatttactgagtgtttgactgggctccggctacgtagccttcacggaggataggttggaacatatgaagatgttccggcacctatcctccgtttttgctattgcgaccattgcgccgctggcgttggcggccacgctagccgtgacgcctgcaatcgcacaggccgaccagctgcccaacccggattgggtggcattgctctccgactacgaaaagaactattggcaggcccccaccgatgccgaacacggtggcaaggtgctcgacgccgatacaatgaaactcgacgaagatttggccgtggccattaaccacaaagccgccgaaaatctcgataaggatggcctgaacgcccaacgcaagcgtgcgctcgtcgactccgatctgcaagccgaggaagccatgccggacgcgctcggtccggtgcttggcaaatatatgagcgaagggctcaaatccgggaaactcaacgccgtcgccgatatcttctcctttaacgtggtctccacctacgcctcaaaacgtgcggccatgcatccgcgcccctatctgaaccgtgcggaaagcagctacggcggcactaacgatctcgccggactgcccgccacgcttgacatcaagcaatcaccctcatggctcgaacacgtgcccggctactcgaacttgcagaaaaacagttcctacccctccggccacactaccggcgcctattcgtggggtatcgcgctggccggcatgattcccgaactcgcgccgcaaatcatggcccgcacttcggaggccggcaacaaccgcatcgtgctcggcgtgcattatccgcttgacatcatgggcgggcgcattggcgcatccgcccagaacgggcagtactggcataacgaattcgcttcgtccatcgtgcccgcgtcccggcagctgcgcgactatctggtgtcccgctgcgccgcggacggccacggcactaccctcgtcgtctgcatcgccaacaccaaggcctccggttcgggcggctacaccaacgattttctggacccagtggccaccgagccggtcgtggaccaagcctcggccgtgcgcgtctacaccgcacgcctgacctacaccttcccgaaagacaccgcccagtccggcgctgatttcgtggccccgcgcggggcagcggacgtgctgcgactggcctatcccgaactgcacgccgatcagcgcaacgcgattttgaaagccactgccttggattccggataccccctatggcaatcgagcgacggctggcagcgtatcaactgggccaaagccctgtgcgcccgcgtcaccttggataagcacggcgatgtggccaaggtcgagaccgccgaccaagtggcgcttaccggcccgagtgtggtcaatgcccagtacaccgacgcgggcaatcacccggcgtcggatagctcggcgggtgaaaacagtgccattgcggccggaccggatctcgccaccctccatgccgcgcaacgaccggcgttgatcagcgtagctatcggtaccgctgtaatcgcgattgtcggcggaatacggacggttcgacgcaaatccaagaaccagcttcagcagtaattcagccaaagttcagtcgcgctgctcaccgctgcggtgacactgagcagcatcgccctgatcggcgtgcccgctgcgactgcggacgagcagcagaccactgccgaacagaacacggctgccaaaccatccgtaatcatcaacgaggtctatgccggcaatacgaaagctgccggagacccggatagcaagcgttgcgattgggccgagctcaagaacaccggctccacagacgttgacgtgaagggctggggcatctacgacagcggcaagaaagccaagaagcactacaccatcggcgccagcgaagtaacgaatacggacaccgtcatcaaagccggcggatatctggtggcatacatcgaccccgacaaggcaaagcctgccaaaacctgcgatgccgctcccgatatgaaagtctcctcgatcaagagcgacaatctgatagtcacgattctggccacttcgaattgtgatgataagaacgcatccacgaaattcaatgattcggccacccgactcacgttgcaggacagcgacgataatgtcgtggccgatgccgtgttcgatttttcgggtctattccacgtataccgcgcagttgtccagcaagcgcaagggcatgaaagctgaaggcaagacctggaactaccacgatattcttgcgcaattcatcacgatgcacaacaagaagtcaaacgtactgcttatctggtcgggtgactggcccacctacagcagcaattccgacaaatactatgtgattcttgccggtgagggcttcgactcgacggatgaggcttggaattggtgcaaagccaacaattacggtccgaacgactgcatgcctatagatttgcagtaacaagtggaatgtgaatgtcgctacgttgctgggtctcctgagttacaagacgtacaatcgggagcatggccaaggacgacgacagaaccaacaagcctgaagaggccggcaagtggggtacagccggaaaatcctcaggaaagaacaacaagaacggcaagggaaaggaatacaaaaccgatcgacggatcgacaaggtattacagctcgcggcggatcgcatagacaccatcgactccagtgccagcgtgcctgaacgactggcacgtgcggcgaaatccagtgaactgctcagcgccgtatggtcgttgccgcccgctcaacgtcttatgttccaccacggcatgcaggtcactgatgtcgaaggcgattccactcccggattcgacggcaataaagaggacgccgaggagttcatttcgatcagctcctccgaaatcgcccgataccagcggctcatgtacgcgaatggcgtcaaaggctcgacacggcggctgctcatcgtgctgcaaggcatggatgcctccggcaagggcggcatcgtgcgtcacgtgttcagccaaggtgacccgatgggcatccattaccatggcttcggcaagcctgcggccgaggagctcgaccacgacttcctctggcgcgtgaagcgtgaagtgcccaaggcggggtggattgccgtattcgaccgttcccattatgaagatgtggtcatgccgcacgtctatggcacctatcccgaagacgtatggcgtgcccgctacgaccagatcaacgatttcgaacgtgaactggccgccagcggatgcgccatcctcaagatcttcctcgtggtaagccaggaagaacagaaaaaacactttcttgggagactggacgatcccaccaagttctggaaattcgatatctccgacctcgaggcccgcgaccgatgggatgagtacatgttcgcttggcaggaagtgttcgagaaaaccagcacggccgccgcaccgtggtacctcgttccggccgataaccgctggtattcgcgagccgtggtctccgaactgctgcgcaccaccttgaagaacatgaacatgacctggcctcccctcgaacccgaggtggaccccgacgaggtgcgccgccggttggcgtgagcgatcctcccattggcggagccaagcgcatggcacagctcttcgcatggctccgcccgctggcgggaggcgtcgcatagcgacggagggcggctcgtgccgtcggaataggccactaggtagactgagcattatgactgacgagaaggaatacggatccctggggcggctggcccccgaatgggacggcgacggacgcgaacggaatcttacggccgacgacatctacgaacggttcttcggctgggtggaagacgtcaagggcatcgagccgtggccgcatcaggaagaggccattatggacctcttggccggcgaccatgtgattttgaataccccgaccggttcgggcaaatcgctggtggcgctcggcatgcacttcgccgccctatgcactggccgccgctcctattacaccgctccgatcaaggcgctggtgtcggagaaattcttcgacttggtcgaagtgttcggccgcgacaatgtcggcatgatcaccggtgacagccacatcaacgcggacgcgccgatcatctgctgcaccgccgaaatcctcgccaatcaggctttgcgcgaaggcacccatgccgatgtgggcctcgtggcgatggacgaattccattattacggtgatccggagcgcggctgggcgtggcaggtgccactgctcacgctgccgcagacccagttcctgctgatgagcgccacactcggcaatgtggacgccatcgccgacaagctctccgatctgaacgacaccccggacgtggatgtaatcgccgacgcgccgcgaccggtgccgttgagctacgaatacacgctcgacccgatggaaaaaaccgtggaactcgccttccgcaacggcgaaaccccgatttacgtggtccacttttcgcaggacgccgcattggagaccgcgcaagcgctcgcctccaccggtgtatccagcaaggaacagcgccaagccatcgcagaagccatcaaaggcgtcaagttcaccacagccttcggcaagattctgcagcgactgctgcgcaccggtgtcggcatccatcacgccggcatgctgcctcgctaccgccgcctggtcgaacagctcgcccagcagggtctgctgccggtgatttgcggcaccgatacattgggcgtcggcatcaatgtgccgattcactccgtggtgctcacggccctgaccaagttcgacggcaccaagatgcgccgcctgcgcgcccgcgaattccaccagattgccggacgagctggccgtatgggattcgataccgagggactggtgatcgccgaggctcccgaatatgaaatcgaaaaccagaaagccatcgccaaggccgggggagatccgaagaaactcaagaaggtcaagcgcaagaaggcgccggaaggttttgtgacctggaaccagagcacgtttgataagctcatcgacgctgaaccggagaccctggtcccgcacctgaaaatcacgcattcgatggtgctcaatgaagtggcgcagggcggtgacgcccgtgcccgtatcgacgatctcatcgacgattccgcgcagacccccgaccagaaggagcatctgcaccagcgggccgacgagatcttccaaaccctgttcgataccgaagtcatcgaaaccgaggaccgcaaggacggcggcaaggactactacatgacccttgatatgccggacgacttcgccctcgaccagccgctctccccgttcctgctggccgcgctcgaactgctcgaccccgagtccgacacctatgcgctggacgtgatctccatggccgaggccacgctcgaagaccccaagcaggtgctgcgtgcccaggagcgtcaggcccgagacaaggcgatggccgatatgaaggccgacggactcgactatgacgagcgtatggataagctgcaggagattacgtatccgaagccactggaagacatgctcgaagccgcgttcgatcagtaccgccacgatgtgccgtgggccaacgactactggctgtcgccgaaatccgtggtgcgcgacatggtggaaaccgcctccgacttcaccggatacatcacccgatacaacatcgcccgctccgaaggcaccctgttgcgctacctctcggacgcctaccgcacgctggcgcgcaccgtgccgcccgaaaagcgtgacgagcaactcgaagacatcatctcgtggctgcgcgtgctcgtgcgctccatcgactcctcgctggtggacgaatgggagaacgccggcgattccgccgaccagtccgaggcggcggcctccttggcggcgccgggcaagaagaacgcggtggtcgaggaccgacgaggccttatcgtgctgatcagaaacgccatgttccgccgtgtgcagcttatggacctcgaccagccggacaagctcggcgcgctcgacaaagactggggctacggcgtgcacgaatgggaagatgtgctcgacgactactacgacgagcacgagtacgtgggcatcggcgccgaagcgcgctcgcccgaactgttcatgttggatgacaagcacgagaacgacgagcatacgtggaaggtgcgtcagattatcgatgattccgatggcgatcacgattgggccatcgaaggcatcgtggacctcgacgccacccaagacaccggcgaagtagtcttccacgactacaaggtgagtaactgattcctttcttggctcccctctctgagggaagccagggtgcagctcgaacgtctgttcgaacactggggtactataggacgttatgagtgagaacgatttgtttggggcggctgatgcgccggagtcgatgacgcggccgttggcggtgcgcatgcgtccacgcactttggacgaggtgattggccaaacgcaggtgttgggccagggctcgccgctgcgccgcctcgccaatccggccagcaaaggcagtctcaccgcgccgagctccgtaatcctgttcggccctccaggcgtcggcaaaaccacgctcgccaccatcgtggccggccaatccggccgcgtgtttgaggaactctccgccgtgacatccggcgtcaaagacgtgcgcgacgtactcacccgcgctcacgaacggctcgtgtcacgcggccgggaaaccgtactgttcatcgacgaggtgcatcgcttctccaaatcccagcaggatgcgctgcttcccgccgtcgaaaaccgcgacgtgacctttatcggcgccaccaccgagaacccgagcttttccatcatcaaaccgttgctctcccgttcggtggtcgtcaagcttgagtcattggagcctgatcagctcaccgaactggtgcagcgcgcgctgactgatgaccgcggtctcaggggcgaggtcaaagccacggacgaagccatcgccgacatcgtgcgcatggccggtggcgacgcacgcaagagtctcacgattctggaggccgcggctggcgcggttaccggcgacgaagcccgcaaaaagggcgcacgccgacccatcatcacctccgaaatcgtggctacggtaatggacaccgccaccgtgcgctacgacaaagacggcgatgaccattacgacgtgatttccgcattcatcaaatccatgcggggctccgatccggatgccgccatccattatctggcgcgcatgctgaaagcgggtgaagatccgcgcttcatcgcccgtcgcatcatgatcgccgccagcgaggaagtcggcatggccgccccgcagattttgcaggtcaccgtggccgcggcgcaggccgtggcgctggtcggcatgcccgaggcgcgtattattttggccgaagccacgattgccgtggccaccgcgcccaaatcaaacgccagctataacgccattaaccaggcgctcgcggacgtggatgccggcaagatcggcgctgttccgctgtatttgaggaacgcccccaccaagcttatgaaagagtggggcaaccacgagggctacaagtatgcgcacgattggcccggtgccgtggcgccacaggaatatatgcccgaagagctgcgtggcaccgagtactaccatcccaacgatcgcggctacgaacacgaagtcagccagcgtcttgccaagattcgcccgatgttgcatggcggggaacccgaacagaaatgaacataggggagtaaagtgtaacgcaacaataacagtgggaaagggaagacaaacaccatggcgaccatcttcatcgtggacgacgatcaggccatcggcgaaatgcttagtcttgttttggaaaacgagggattccagaccgtgacctgcctggacgggctgagggctgtggaaatgttccccatcgtcaagcccgatttgattctgcttgacgttatgctccccgggctggacggcacgggggtggcccgccgcatcagagctacctctaatgtgccgattatcatgctcaccgccaaatcagacacacttgacgtcgtggccggcttggaagccggggccgacgactacgtgcccaagcccttcaaagtggccgaattgctggcgcgtatccatgcacgcttccgcatcgccaagccggccgccgaagacggtgccaccggtggcgcaagcggtggcaatgcaaacgtcaaccatctggaacgcggatccatcgtcatcgaccgtttggaacacaccgccaccaaggatggcaaggacctgaatcttactccgatggaattcgagctgctgttcatgcttgcggccgccgccggcgaggccatcagtcgttccagcctgctcaagaatgtctggggatacgagaattccggcgatacgcgcctggtcaatgtgcatgttcaacgccttagggccaaagtggaggacgaccccgagaacccgcaaatcgtgcagaccgtacgtggcatcggctacaagttcgtcactcctgaacaatgaacctgcgccctcgattcagcctcaaacgcttgctgcgccacggacgcgctgaagttcgtcgctcgctgcaggcccgcaccgtggccctcaccgtgattcttacactggccgtggccatcgtcttctctggcgtatcgatggtatcagtgcgcgcctcgctgcttacccaaatcacttcgcagtcgcgtgccgactattcaaacatggtgcagcaggcccaaaccagtctggacgcggccgatgtctccgccacagtgcagatccagcagctggtcaatgacttggcgtcctcgttgcaatccgaggggccctccaacctgataggtgtgtatttgtggagtcgtgataccaactcgcgtgccatcattcccgtatccaccgaacccagctatcaaagtctgatttctgatgacatccgttcgtccgtggcttccgacttggatgacatcgtgttctatcagccggtcgaaattcccggtgattccggcatgtcgggcagcgggacgcccgcagcggtgctcggcaccgtattggactttggcgtggccggcaacctcgaattcttcgccatttattcgtacacgttccagcagcagtccttgacgcagattcagctcagtctggtggtcatctgtgcgttgctgtccatcgtggtgggcgtagtaatctggctggtgattcgtggcatcgtgcgcccgattgaacgagtggcagcggcctcggaaacactggcctccggcaatctcgatatgcgcgttaccgtgaatcgtaaggatgagcttggtgtgctgcagcaatccttcaatacgatggctgatgcgctcaaccagaagattgatgagctggaggaagcaagcgttttccagaaacgatttgtgtccgacgtcagtcatgaattgcgcaccccggtgaccaccatgcgtatggcttccgacctgctcgaaatgaaaaaagacggcttcgacccctccaccaagcgtacggtcgaactgttggccggccagatcagtcgattccaagacatgctcgccgatctgttggaaatctcccgctacgatgccggttatgcggcacttgaccttgtggaaaccgatttatgcgaaccaattgaaacggcagtggaccaagttgccggcatcgcccaagccaaacgggtgccgattcacacgtatctgcccaatgtgcaggttttgactcgtatcgattcgcgtcgagtgattcgcatcgtcagaaatctgttggccaatgccgtcgatttcgctgaggaccggccgatcgaagtgcgtgtcgcggccaaccgcaaagccgtggccatcagcgttcgcgactatggcgttggtatcgacgaagacaaagtcgctcatgtattcgatcgattctggagaagcgacccttcacgttcgcgcgttaccggcggcaccggattgggcttggccatcgccatgactgatgccttgctgcaccacggtactatccgtgtacgttcggcagtgggggagggcacctggttcttggtattgctgccgcgtgaccccgaccaaggtgaggtggcggacgctgaactgccggtgaattttgcttctgaaacgcccgatgacctgcgtattaccggtgggtttggtgtggccaccagccaagtcacacatgattatcatgaggttcgccgcgacacgatgatggggaggccgctatgagacgagtgaccagaacgattgccgccgcaggcgcggccatagtctgttgcgtcacgatgacggcatgctcaagtccgttcggtttgccgattagcggctcggtgcagactctggcaccggtggaacagcagactcagcgtgtttacaccaatcctcagggacctgcggacgatgcgcagccggaaaccatcgtcaaagggttctatgatgccatgcctgccggcgtacagtccgatggctaccgtgtggcccgtgagtttctgaccggttcggcgtcggccggatggaatggcgattcctcggcactggtctacagcggtacgccggatttccgccgccgtgccaatacgatgagtaccccgcaaggggcggagagctcgctgattgtagaagtacagctccaagtggtcggctctctggactcgcatggcgtgtatacgccgacagatagcagcacgatcagcaaagttccttatatcttgattaaaagaagcggccagtggcgcatctcctcgttggagaacggcgtggtgatatccaccgccgattttgaacaagtcttccgccaagtatccgtgtatcaggtgagcacatccggcaaacagctcataccggatgttcgatggctgagctggcgcaactggcgcacccaggcagtcggtgaagtactctcggatgcaccctcctggttggaaggagtgctgcgaggcaccggcttgcctaccatcaaactcgcggtcgacagcgtgccggtgaagaacaatgtggtggagatacaccttaacagcggtatcaatgcgttgaatgaggaagaacgaggcctgctggtacatcgcatccgtctgactatgggcgacggcaatgccgaatacgcgctgaagattaccggcgacggagtggactattctgatgccgacgcaaatgtgaaacttactaccgagcagccgacagcgggcgtatacacgttgaccggtgggcatatcgtttccctggccagctccagtccgttgcgtgtaggggaggcccccggatatgacgatgctcggggcttcgttttttcctcatccggcggtgcggtgttgcgtgcggacggcgtggtcgaatgcctgaaatctgatggtgcgtcctgtggggtgatgttctccggcgagtcgatgcgatcgattaccgaaggtctggatggcgaagtatgggctgtatccgagaacgggcgcgaattgcatgtgtcagatgggggtaaggaaaccgatctgaagcttgattggcttggcgctgccgacagcattgtggcattggcggtttctccggaagggtgccgattggcgttggcagtcgagggcgaggacacgaacggcgtgatgatgaccggtgtggcgcgcaacggtgataaaacactgagcggtctgagcaaagcggccacccaagtgagtgtgctcagacacgtcaccatgctcacgttctacaacgatctgaatctggtgtacgccaccacacctcctgagggaaacagcgaacaacaagaggcatggcgtcaaatggcaccaggcccggccaatgcgcagcgtctgcctaatggaaccataacgtcgatggcatcggggcagattagcctgtcccatcgcctggccattgtggacgatttgggtattgttcgctccgtttccggctcactcgacggttcctggaccatcgccgatagccaggtcactgccctcggtgcgcagtagatggtataagaaaaacggtgttcataataacctttcttgttgtatgaggcaacggctttgtcgctcggctggcgagcggcattgccgctgcgcaaccaatcactattattggtctgttatcaaggcaaaacagtgttgcgacgccatttttgaaccactgttattaatttgttataaacctgttatcaaactgttatcgcatgcgattgaacatttggcctgtgagcgtcatactagaggctgtcgatgacgaacagtcaccaaacaggatgaaagatcatccaaaaaataaacactgctcgaggaggagtatttatgaagaattggaagaaggccattgccctcgttgcttctgctgctgcgcttgtcagcgttgccgcatgcggttccagcaacgcaggtggcagctcggactccggcaagaagacggttggcttcgttgctgtgggccctgagggcggcttccgtaccgccaacgagaaggacattcagcaggcattcgaggatgccggctttgacctgacctactctccgacccagaacaacgatcagcagaagcagattcaggcgttcaacaagttcgttaacgacgaagtcgacgccatcatcctgtcctccaccgaggattccggttgggatgactccctgaagaaggccgctgaggctgagattccggtcttcaccgttgaccgtaacgtggacgtcaaggacgccgaggccaagaaggccatcgttgctcacatcggaccgtccaacgtctggtgcggcgagcaggctgccgagttcgtgaacaagaacttcccggatggcgccaacggcttcatcctcgaaggccctgccggcctgtccgtggtgaaggatcgtggcactggttgggacaacaaggttgcctccaacgtcaaggttcttgagtcccagtccgctaactggtccactgatgaggccaagaccgtgaccgctggtctgctcgacaagtacaagtccgacaacccgcagttcatcttcgctcagaacgacgagatgggcctcggtgccgctcaggctgttgacgccgccggcctcaagggcaaggtcaagatcatcaccatcgacggtaccaagaacgctctgcaggctcttgttgatggcgacctctcctacgtgatcgagtacaacccgatcttcggtaaggaaaccgctcaggccgtcaaggactatctggatggcaagaccgttgagaaggacatcgagatcgagtccaagaccttcgacgccgcctccgccaaggaagccctggacaacaacacccgcgcctactgataagtctgctgcgactcattgataactggaccaaataattgatgtgatggtgtgagaaggatgttccttccacaccatcactcatgtgtggctcaaatatcacaaaacgataacatttcattctcgtttaaggcaaagacatgacagataaaaaccccatcgtcgtaatgaaaggcattacgattgaattcccgggcgtcaaggccttggatggtgttgatttgactctctacccgggtgaagttcacgccctgatgggtgagaacggtgcaggcaagtccaccatgattaaggctctgaccggtgtgtacaagatcaacgccggctccattatggtggacggcaagcctcagcagttcaacggcaccctcgacgcacaaaacgccggtatcgccaccgtgtatcaggaagtgaacctgtgcaccaacctttccgtcggtgagaacgtgatgctgggccacgaaaagcgcggccccttcggcatcgactggaagaagacccacgaggccgccaagaagtatttggcacagatgggcctcgaatccattgacccgcacactccgctgagctccatctccatcgctatgcagcagctggtcgccatcgcccgcgctatggttatcaacgccaaggtgctgattctcgatgagccgacctcttcgctggatgccaacgaggtcagggacctgttcgcgatcatgcgcaaggtgcgtgactcgggcgtggccatcctcttcgtctcccacttcctcgatcagatttatgagattaccgatcgtctgaccattctgcgtaacggccagttcatcaaggaggtcatgaccaaggacaccccgcgcgacgaactcatcggcatgatgattggtaagtccgccgccgagctgtcccagattggtgccaagaaggctcgccgtgaaatcacccctggcgagaagccgatcgtcgatgtcaagggcctcggcaagaagggcaccatcaacccggttgatgttgacatctacaagggtgaggtcgttggcttcgctggcctgctgggctccggtcgtaccgagcttggtcgactcctgtatggtgccgacaagccggattcgggtacctacacgctcaacggcaagaaggtcaacatctccgatccgtacacggctttgaagaacaaaatcgcgtactccaccgaaaaccgtcgtgatgagggcatcatcggcgacctgaccgtccgccagaacatccttatcgccctgcaggcaacgcgcggtatgttcaagccgattcccaagaaggaagcggacgccatcgttgacaagtacatgaaggaactcaacgttcgtcccgccgacccggatcgcccggtcaagaatctctccggcggcaaccagcagaaggtgctcattggccgttggctggccacgcaccccgagctgctgattctggacgagccgacccgtggtatcgatatcggtgccaaggctgaaattcagcaggtcgtgcttgacctggcttctcagggcatgggcgttgtcttcatctcctccgagcttgaagaggtcgtgcgtctgtccgacgacatcgaggttctcaaggaccgccacaagatcgcagaaatcgaaaacgacgacaccgtctctcaggcgaccatcgtcgaaaccatcgctaacaccaacgtaaacaccggaaaggaggcatgagatggctgaaaaggcaaaagccgagggcaacaactttgtcaagaagctgctgagcagcaacctgacctggtcgatcgtcgcattcattcttctggtcatcatctgcaccatcttccagcatgacttcctggctttgagctggaacagcaacaccggtggtctggccggcccgctgatcaccatgctccaggaatctgcccgatacctgatgattgcaaccggtatgaccttggttatctccaccgccggtatcgacctttcggtcggttccgttatggcagtggcaggtgccgccgccatgcagaccctgtccaatggcatgaacgtgtggctctccatcctcatcgccttggctgttggtctggccattggctgcgtcaacggcgctctggtttccttcctgggcctacagccgttcatcaccaccctgattatgatgctcgccggccgtggtatggccaaggtcatcacctccggtgagaacaccgacgcctccgcagttgctggcaacgaaccgctgaagtggttcgccaacggcttcattctgggcattcccgccaacttcgtcatcgccgttatcattgtgattctcgttggcctgctgtgccgcaagaccgctatgggcatgatgattgaggccgtgggcatcaaccaggaagcctcccgtatgaccggtatcaagccgaagaagatcctcttcctcgtctacgcgatttccggcttcctcgcggccatcgctggtctgttcgccaccgcatccgtgatgcgtgtcgacgtggttaagaccggtcaggacctcgaaatgtacgccattctggcagtcgtcatcggcggtacttcactgctgggtggtaagttctccctcgccggctctgctgtcggtgctgtaattatcgccatgatccgcaagaccatcatcaccctgggcgtcaacgccgaggcaactccggccttcttcgccgtcgttgtgattgtgatctgcgtgatgcaggctccgaagattcacaacctgagcgcgaatatgaaacgcaagcgcgcgctcaaggctcaagctaaggcggtggcagcatgacaacagctacggcaaacaaagtgaaggctcccaagaagggcttcaagctcgatcgtcagatgatcccgaccctcgcggccgtggtgatcttcatcctgatgatcatcatgggtcaggcgttgttcggcacctacattcgactgggcttcatctcctccctgttcattgaccacgcctacctgattattctggctgtggccatgaccctgccgattctgaccggtggtatcgatttgtctgtcggtgctatcgtggccatcaccgcagtcgtcggcctgaagctggcgaacgccggcgtgcccgccttcctggtcatgatcatcatgctgctcatcggcgctgtgttcggcctgctggccggcaccttgatcgaggaattcaacatgcagccgttcatcgcgaccctgtcgacgatgttcctggcccgtggtcttgcctccatcatctccaccgactcgctgaccttcccgcagggcaatgacttctcgttcatctccaacgtgatcaagatcatcgacaatccgaagatctccaacgatctgtccttcaacgtcggcgtgatcatcgcactggtggttgtggtcttcggctacgtcttcctgcaccatacccgcaccggacgcaccatctacgccatcggcggctcccgttcctccgcggaactcatgggtctgccggtcaagcgcacgcagtacatcatctacttgacctctgcgactctcgccgccctggcctcgatcgtgtacaccgcaaacatcggctctgccaagaacaccgtgggtgttggctgggagctcgacgccgttgcctccgtggtcatcggcggtacgatcatcaccggtggcttcggctacgtgctcggctccgtgctcggctctctggtccgctccatcctcgatccgctcacctctgacttcggtgtgccggccgaatggaccaccatcgttatcggtctcatgatcctcgtcttcgttgtgcttcagcgcgcggtgatggcggtcggcggagataaaaaatagcgggcttgcccgctcggtctccgcaccgaatacgacacacaccataactgaataggcgggatcagcccggctgctgtgatggcaaggtcacagcagccggcactgcccgccaaagctttctttctccttttcttcctttcattagcgtgtggggcgtgccccggggttctcccggggcacgccccacacgtgtttggaaagctgggactctattgatgatcggatttatgcacgcttacgtgcctcgcgaatgcggaacgcggtggccagacagcaccagccaatcaggcagataaccgtcatcgtggcaaacgtccatgtgccgccgacggcagtggcgtgagcaaactcagcggtgccttcttctcctgcgccggcctgagccacggaaagaatcgtggagaacagtgcggtaccggcagcgccgccaaactgaagacacgtgttgaaaatggcgttgccgtccggcttgaactcgggagagacctccgacaggccactggtcatcacattcgcattgccgatggaatagaacagaccgaaaatgaaatagaatccggcgagcagcaagggcgtaagctgcatcgagaacaccagcataagcactgggcccaaaatagcgatgccgatcggaatcagaatcggcttgaccgcgccgaacttatcgtagaaccagccgccaagcggggcacagacagcgccgaccagtgctccgggcagtaccagagagccggccacaaatgccgtggtaccgagcgagagctgtgccacattggtgatgacatagccgtagccgatggcgaccaatggcagcagcagatatgcgcaggcgtgtaacagtacggcgggatccttgagaatgccaaggcgcagcagcggggagaaggcacgcttggaactcatggcgaacacgatcaacaaggcgaggcccgcaatcagactgacaatggcgataatgccggagcgtgtggctgacttgccggacaccgccgcactgatggccacgccaccttggttgagcgccagcaccagaccgaccaacgcgacaacaatggacccaagctgaatcgggtcaagataggcagcctcggtcggtgtcttctgctcaatgcacttcatgccgatgcatgctgcgattagcaccagcggaatggcgatgacgaaaatcgcgcgccacggcagcactgtggtcaccgcgccgccgacggtcgggccgatggccggagccacggtaatgaccagcgatcctacgcccatcaatcggccgattttcgaacgaggagactgctccagaatgatgttgatcatcaacggcgtggccacgcctgagccaatgccctgaataatgcgggcgacaatcagcagcgggaaggcttgggcgacgatcataatcagcgagccaacgatggccagaatcacagccgcaagaaaaatggttttcagtgcgaatcggcgcttcaaaaacgagctgatgggcatggtggcggccaccgccaacagataaatcgtggtaatccattgcacagtggccgtgtcgacatggaattcgcgcatcagtgcggggaaaagcacggtcatcacggtttcggtcagaatgccaatgaaggcaagtgagccgacagccacaatcgcgccgataagacgtgtgggaatcttctcgttatcaatatgctgctcaggcatacatgctcctaaacgttcggttgcaaggtatggaatgtaaggtttaccaaccggcgtaggtacctgtgcgtgcggataaaccggcaatcgtactgccttggctgcacgctatggaatcacaaaaccacctgtgagtgtacggttcggggcggacgctacggtcgatgcgcaatgggttgtcccttggtttggtggggtttgatggggcggattcggcattggtccggtagcagttcggcattggttcagcatgaggaaaccgcgataatatctgccctgccgcctagtttggtgaaccatgggtattgagaacacgcataagctgattgtcaactgcctgccactcaacgaaggagaacggcgggctttcgccaaggcggctcgcgatgtgccgcaggaattcgtgggcgacgaagcgcaccgcggcgacatggtctggtcggccgctgttcccgaggagcttcgctcccgagctaccgcagtcatcggcaactttccggtctcgcaggcttcccaatacacccgtcttgaatggttgcagaccttcagagccggtgtggatgcgtacatctgcccgggtgtgctgcctcgcggcaccatggtcaccaatgcgagcggcgcgtatggccaaagcgtgtcggaacacatgttcgccaccatgtgggcattgatgaagaacctcaaccggtatgcctccaatcagcgtgatcatcagtggcaggatgaaggaccggtattgagcccggaaggtggcatcgcgctgattatcggcgtcggtgacatcgggtcgcatttcgctcagcttgcccaatccgtaggtatgcgtactttcggcgtgcgccgtcatgcggacgtgccggccaagggcattgaaaagatgtatggcttcgagcggctggagacgctgttgccattggcagacgtggtggcgatggcggtgccgcgctcgccgcagacccatcatctgctgaatgcggatcgtctgggtcgtctgaaatccacagccatcgtgattaatgccgggcgtggcgacgccatcgatcccgaggccttggctgacgccttgcacaatggacggctccacggtgccggattggacgtcaccgagcctgagccgttgccggcggaaagtccgttgtgggatgagccgcattgcctgatcaccccgcatgtggccggcggcaatcatttggaaaagacttccgaacacatcatccgcatcgccctgaccaacgtttcccgctatgccaaacagcaggaactgttgaatctcgtgcgatactgattcgcctgtatcgggtgtacatgaactcatgtacacggccggcgtgtcgcatcccacggaggctgcggcatcgagatgatacctgcagaggcgtggttgatcaggggcccaatgaacgtggcccgaggttagtttcagtctgatagttcgtagccgttggcgtctttatgccacggtgagccgggcttgctgcacagaatgatgatgccttcaacaaagccccagatggcggctgcgattgggccaagtccgagcagaatccagccgacaagcgtcagcagcagctgggccacggccttgccggtgttgccgagatagaagttgtgcacaccaagtccgccgaggaagatgcccaacaggccggcagccagcttggacttggacgattgccccaccggggcggcggcatacggagcggcggtgtattgcggctgcgcgtaggggttcggctgctggtaagcctgtccatagccgggctgctggccgtagcccgctgcgggctgtgcgggctggccgtactgcggctggccgtactgaggctgagcgtatgcgccggcgggctggccgtattgcggttgctgctggccgtagcttccggcggcgggttgagcgtatgcggcgggctgtggggcgccatagccctgcggctgctgtgcggcatcttggccgtaagacggttgtgccggctgtgcgggctgtgccggctgcggaacactgtccgaaccgtacggttgttgttgattatcagtcatgcgggtcagtcccctctcaatcgggaacggcaataccttcttaccgtttctgcacaacatcatctcatgttttgcccaatagtaaaacctgccgcgctacgattgggccatgagaagtttcctgaccagctggttgattatgactatcgccgccgccgtcatggtcgcggtgactcccggcatgaccccggtgggggagcctccgattctcggcatcgccgcgttcgctttgttcatggcgctgattaatgcgtcaatcaagccgattgtgcatctgatcgcactgccgtttgcgattctgtctctcgggctggtcaccttgattatcaattggctgttcatgcgactcgccagctggctggcggtcagtctgttcggcgtgggcgtcttcgtacacggtttctggtggtcggtactggggtccttggtcctgaccattgttgcgggaatcgtcgggtccatcttggatcagtgacggtgctcgctgggcgaatatgagtaatggcggttggaatcggactgattccaaccgccattactcatatcaagctacgggatcgagcggggcgaacattactcgcgcaccaagcggatatgctccacatcgtcgcgccgggagcgacggaacagcacgaaacgattgccgatggactgcaccacttcggcgttcagctgctcggcaagctcggcggcggcttccttggcggtcaggccagaaccgtcctgcacggcgcacttgatgagctcgtgcttctcaatggtctcatcggcctgattgacggccgactcggtcaaatcgttcttgcccacatagaacaggggcttcagcgagttcgccatcgcgcgcagctgcttgatttgcttcttggtcaatgccatgggaatttccttacatctttcgtataaccacaccagcatagcaaccggtgctgtctgcgctgtttgccgccctacagcgcgatgatggccgcgatgtagatgatgacggcagcggcgaatatgagatctcgcgcggcgatggtcagggcacgccagtgggtgcggcggatgccctcctcgtagcagcgggcgtcaagtgcgaggctcaggttgtccgcgtgacgcaacgtgccggcgaaaatcggcacgataatcgcgctcatcgccttgatgcgctgggccagtgaaccggtttcgatggaaccgccacgcgcggattgggcgtcgacgatggcgcgggtttcgtcggtcagcgttggaatgaatcgcaatgccagactcatgaccagcgcgatttcttgggcatggataccgagccggttgagcggactgatcaaggtggcgaaggcgtcggtcatggcggtaggcgtggtggtagtgaggaacaccgcgcccagaatgattaccaatgcgaaacggcaggcgtacagcacggctatggtcacgccctgatcggtgatgcttagcgggccaagcgccaccaccggcgtgccggtgcgtaccacaaacagattgaccacgcccatcagcaccagcaggatcagaatcggatgaatggattcaagcacccgtaacgggttcaggcgtgccgccgcgataacggccagggtgatggcgatgcccagcgcgagctgggttggcgtgttcaccgcgaacatcgtgaacatggcggccaggaagcccaccatcttcacgcgcgggtcaagtcggtgtatcactgagtgcgcagggccgttggaggatacggccggctcggtgacggtggccgtgacggggccgccggatgcgggggcggcaatcggcatacggaccacgcggtcggcgatttgctcggcctcctcccggtcatgggtgatgatgagcacggtcacgccacgcgatttgagcgtgcgcaacagctcatggatacgcttcttggcttgggcgtccagactcgcggtcggctcgtccatgatgagcacgtcaggattgcaagccagcacgccggcaatggctgccaatcgttgttgcccgccggacaggtcgaagggggagcggtcggcaagatgcccgatatgcagcagttccagtgattcgcgcacgcggtcggctacctcggtctcgccaagcccttggttgcgtgggccgtacgccacgtcctcggctaccgtgtcagcgaacagctgatgctctggatgctgcatcacgtaacccacatgccggcgcaattgcgctaattgcttgcgattcgccgacttcgggcgcacgttgcgaccgcgcttgccggtcgaggccaccggaacaccggccacttcgatgctgccggcggtcggcgcagtcagtgcgcacaacatgcgcaccagcgtcgacttgcccgaaccattcacgcccatcagtgccacggtttcaccgcgcgcgatggtgaacgacaggtcatcgataaccgcccgtttggccgaaggatagcgataggtcagatgcgagacgcgaataatggggttcgtcatatcaccgatgccatcggagagcagcggcagttcggagccgtcttcgcgctcccgctggcgggggctgtcgttcgtagggcgactgggggcggcttctgtgccgatactaccctcagtctcgctttgcgagacagcctccgctagcggggatcgattatcgacggctgcagtgataccaatgattcgcccggcctccatgtgcacgatgcgatcggcatgaacggtttcatctggatgatgcgtgacatgcacaatagtggtgccgcgcgcctgcaaatcatccaaaatgcgcataacttcggcgcgtgcggattcgtccagcatggcggtcggctcatccaataccagcattgccgggttcatggccagcatgccggcgatggaggcgcgttgctgctgcccgccgctcatacgggtcgggtcggactggcgtaagttcgccaaccccacggcctgcaatgaatcaacgatacgctcgccgatgagctcgcgctccagcccgagattctccgggccaaaggccacgtcatcctccaacacggtggtgaccagctgatcctcgggattctggaacaccataccgatgccgtggcgggcagcacgataggcatcggcattcgggccggctgcgtacacgcgttgccccagtaacgtcacttcaccaccgtccggcgcggtcaatcccgcaatcagacgggctaacgtggatttgcccgacccgttcggaccgaccaagcataggcgctcgccggcatggaccgtgagtgaaacgccatccaaagcccatgaggtgccgcggtcatagctgaaacgaatgtccttgagcacggcggcggggggagcgggttcggcagaatcgtggaactcgtcggcgtcgaaggaatggggtgcaacggtcatgaaacagcaatccgtaactgataggcgaaaacgcagaatcccggcccgtgccgggattctgcgttctggttctttgagtggtctttgagtggtcgttagtcgtggcgggcatcggcccgtctcaggccagtcactgctgcttggacagcaggttggagatcggcttgtagatcaggaaggtgatcacggcgtgaatcgccatcttagccacgttgaacggcagcagaatcggcagaatcatcgcggccacagcttggtaggtcatgtgcgcgtaaatcggcgtgacaatcaggttgctcaccagcgccaccacgatggccagcaccgcacccaccagaatgccgatggcggcacccttgcgcgtacggatcttacggtagatgaacgcggccggcacagacaggaacagcgccaccagcacagccatcagcgaaccccacggattggcgaacatgtgcggcacaaagccgagcacagacacgattgcggcggcggccgggccatacgcaaagccggcaatcaggcagacgatgccggacgggtcgtacttcagccaagtgaccggcgtaatcgggaattcaatgaagctggtgaccatcgccagcgccacgaacagtgcatacatggcgatacggcgcgtggaccagcggccagaatcggccacaccagtggtgtgtgagccaagtttggcgctggtgctggcggtggacgtgctggccgaaccctcggcctcgggtgccacagaacgaacaacttgcatgcgaatacgcgaagatacactcataatgagccctcgtttcttccatccggactataccgttggctccggaatctcaccggatcagccgcttgcgcgggtcgcgggcttcctgccatccccgttatgaaacccggggtgcaggttaccgccagtaaggaattgcaccttccctgaaactgacaggcttattcatacgccatgcgccggacgtatgcaacccgcgtttcactgtgcagaaattcgtcttgtgccggtcaagtgcaacaatgggagccatggctgaagtgaagaaacccaacaacaccatcgacaagcttgccctgatcgtcaccacctacaaacgtcagcagttgcttgagacactgttcgattcgattctggcgcttgaacaggcaccgtggcgcattgtcatcgtggacaatgagcagtccgatcagacggcggacatggtcgctgcgtttgccggcaaggtgaccggccaatggggcaccaccgtggccgaccagtccggtaacgaagaacgtgtggtctatgcgccgcagaccgagaacctgggtggtgcgggcggtttctccgccggcgtggccaaagcctacgagctgggtgccgcatggttctgggtgatggatgacgatgtggccgtgctgccggacgccattgccaagctgtccaagtggaccgacaagcacgaggtgattcagggctcccgattcgactacgatggcggcccgttctactggcagtacgacttcattgtgccgctgggcatcccgaacccgattgcgcccgccgcattcggcccggccggataccgagtgatggacacgctgtgcttcgaaggcggcctgttcaaccgccgtgtggttacggaaatcggtctgccggacccgcgcttcttcatctactgggatgacacgatgtatggctaccgcgccagcaaggtcaccaacccgattgtggtgcccgacgtgatcctgcgccgtacgcgcgaaatcggcaattgggatatcgccggcgtgcgccagctcaactccacatccgacatgaaccggtatcacatcatgcgcaaccgcggatacatggcccggtacttcatgacctatggtgacttccgtccgctggtgtttggactgggtaccgtgctcaccgcggccaaggaagtcattcgcctggtgatggtggatcgcgagcacctcaagaccggtttggtacagattgccaagggctggtgggactcgcgcaagctgatgcacgaccccacctggaagcccatgccgtcgctgaagtagccgtagtagtggctcccctctatgagggggggtcactacaggttacttatgtatgaacaggccaccgtcgccccaagcccactggccttggccggcaccgatctggaagtgcagcttggcgatgcccatgtcattgaacgcgtgatgctcatcttccgcactctgatcgatatgcgcggcggcggtatcgtcggccggattatacgagaaggtgattggctgacggttcatcgcgctcggcgccttcatcgcagcctcgacgccggacttgaaccaatccggagcggcctcgcgcccctcatcgctcattgtggcggtgaactgctcataggtcttggtggcgcggtgcgtgcgttgcgcttcgcatagctcctcataggatttcgcctgataatccagatgattcttcggatgcccgatcaccacaccgagatacagctcctggccagaggtgacgcggcaatgcttggccgcctccgccttgtcccatgagccggcgacccataaggtgccgaggccgcgcaacgtggccgtgagcaccatgcgttcggcatagaagccggcacgctctttggcttcctcatcgttcgcggggccgacgatggccagataattcgccgcattggtcagatgacctgaagcattggcttcggcgaacaccttgggctggtcgcgcaccagctgaatgttgagatcgccgagtaagttgatcggctgaagcgccatctcgagctggcgggccgtatcgtcgtcgatcggctcatcatcgtaggcgcgtacggcggtgtggatgttaattgcatcaataagttgggtatgttctgccatacctcccattatcgcgcgcgacacagagtcaggccaccatagacgccgatttttcctagtatgcgaaatcgcatgcattgcccattgtcaggcttgaaaaacgatacgaatagggtacgtagtgaccggcgacgatgcacacgtttgcacaattggtgtgtaatggtttcgtgttgagcgtaattcgcgttaaactgggcgcaaccttacgaactgatgaaaacgtatggaaaggaaggtcaacgatgattgaaactgcacaggctttcggtgttgacattggcggttccggcatcaaggccgcacctgtcgatctgaccaagggcgatttcgccgagccacgattgaagattctcactcccgaggtctccactcctcaggccgtggccaaaatcgtcaagcagcagctcgaccacttcgaagtgcctgaatccgcacccgttggcatcgctttccccgcgccgatcaagcccggccagaagctcgacttcatggccaaccttgaccagtcttggattggcgtggacgttactgaagtgttctccgaagcctgcggccgcccggtcgtcgtggtaaacgacgccgacgccgccggcctggccgaagtccagttcggtgccgccaagggccaggatggtctggtcatcgccaccacactgggcaccggcatcggcaccgccttgatttacaacggcgtgctcatcccgaacaccgaactcggacacatcatcctgagcgccaagcatctggacgccgagaagtatgcctcctccgcgattcgcgagaatgaggaactgggctacaagaagtgggccaagcgtctgaccaagtactacggccttatggagaagtacttcaacccggacctgttcaccgtcggcggcggcgtgagccgtcagagcgaaaagttcctgccgtacgtggatatcaagaccccgatcgtgcccgccaagctgcgtaaccaggccggcatcgtcggtgccgcctactatgccagcaccaagcagcagtgagccagtgagcgtgggtgtgcagcgctgacccgcgaatatgcttcaggccgtccgactagtcgggcggccttttgcattgcataggaaaggtatgcgacgcgttcccgggaatgttgcgcaaagtgggcgtgtgtatggaggtctgtggcgacgcgttcccgggaatgtgtcgcgtttgagggtgtgattcgggtccagagcgacgcatttccgggaatgttgcgcgtttgagagcggggcagggggcaccacgctctatcgtgggagggtatgagcgtgcatttctcttctcgtgtggatatttctgcgccgaatcccattgcggcggccgaggcggcagccaaggcaaacggcatcgcactcagcaaactcaacgattccaatccgacccgccacgggctggcacctgaattggtgccgagcgtgtatacggccgacccgcgtggaccgcgtgcggcgcgagaagcattggccgcattcctcaatacggcaaaggcggtagacgcaagcagccctcagtcgacttcgcccgccgccagcgagggcgggaacgagcgccatgccgctttcaacaatgcgaataccgccatcgagggcgttgacccggacgccctgtacttgctgagctccacgtccgaggcgtattcgtggctgattaagttactttgcgatgccggcgacgcggtgctggcacccaaacccggctatccgctgattgagtcgattgcacggcttgaatgcgttgacacggtcgaataccagttgcaattcgacggctcctggttcatcgacatcgccgaactcgagcggctgctcagcgagcccggtggcgaacgcatcagagcattggtgctcatcaacccgaacaatccgaccggttcgtacgtaaaaccaaccgagcgtgcacgtatcgtgacattgtgccgtgagcatggcatcgcccttatcgccgatgaagtgttcttcgattactctctcgaacctttccccggcaacgcacggctcgcaggggagcgcggcgtgctcaccttcgccctagacggattctccaaaatgctggccgcgccgcacgccaaagtcgggtggattcaggtgtccggacctgccgaggacgttgccgaggcacagcgtcgactggacgtcatcgccgatgattatctgccgatgagcgacatcatcgccgaacggattcccgcattattgaacgccgcgcccgcacagaccagacgggtgggggagcgcgtgcgcaataacctggccaagttgcacgagttgcttgacgccgatcccaacgggctggtcagcgtgctacgggccgaaggcggctggaacgtgctgctacgagtgccttcagtcatcgatgagaacgagctggtgctgcggttgattgacgagcacaaactgaccggacagcccggctacttcttcgacatgacttccaatggatacctggccgtttccctgctacccgaaccggacgaattcgagcgtggcatccgcgccgtgctcaataccgtcgccgctttgctgcgataggccggtgtttgccggcaccacgcctgtactccacgtacaatagcggcatgggattcttgtttagaccgaaagaactgccacgcccggcgtcgctgacgttcactttggatcaggccgggcatacgtatgatgatgggcacgtgggacttgctcccacggacatcaccatcagcgagctgcgggtggctgtgatcggactgaacggcgcaggcaaatccacattgctgggtctgctggacggttcgttgaaggccaacgccggcacggtgaccattgcgggcggtgaggaacgtcttgacccggctgtgaagaaggacgcgaagcgcatcgataatctggtcggcaaagttcgccgcgaggagattccgaacagcttttaccaagcggcgaatatttccgaggctgtttccgaagcgctgaaaaagcacaaggtgcccgagtcagaacgtcatgcgcgcatcggcaatctgttcgcgcattttgatttggcgcaggtctccaaggccaaggccagcgaactggactccgagaaacggcacctgctggctattgcggccgcgctgagctttgagccgagtgcgattgtggcggatgagccgagcaagggattggatgagattggcgccgcgcatgtggccaaggcgttgttcagctacaacaagcaggtgattttcgccacgcatgacacggatatgatccgccggcccgaatacgccatcgaccgcgtactggtgctggacgagcacgcggtcgcgtttgacggagcgccggctgaggctgtggcgttttatgaggatctgattcgccgcaagtatgaggctgcgaagcggtagcagataggaatcggccgttggaggattggcatcggccgtgaggtcgatgccaatcctcacgcgaagtagaagccgcggaagccgtactggtagacgcggtagatgtatcccgaactgagcaccatcttgtactgtgccttgaggttgccgtcgtcatcgtagacgccgaacaggccctgcatgccgatgtccaccaggttcaggtcatcggacagttcctgtgcggaggagacatacggcgaatacggcacatcgaagtcctgcacttcggtgtaggttccggcgttctcgtcgaccaggtacttgcggaactgggagttcgagttctcatccttggagctctgcgcggtcgaaatgccatcgatcatggtccaatcgaaatcaggacgggtcatggcataaccgaagtcgttatcgaacatgtagatgtagtactggccgtcctccagcgaggaatcgtactgcacagtgattgagtgctggccgccggtgtcgccggaatcacccaccttggtcaggaaggagggctgcgcatccatgccattccatacgctcggctcgccgatcatgtagtcgagcgacggcgtgccttcgatgtcattgatcttgatcatcgtggaggtctcacgtgcggacagcaacgcggagccatcatccatgagctggatggtgttgaagtggatccagtcccaacggttcgtggcggtcggatcggattcgtcgatgccggaatgatcggtggattgcttgtaatcggggaacaggtcgccgaaatccaccagcaggctcacctcgccggagtcggtgtccaccttgatgacctgaacctgcacggcatggtccgaatgtttcagatcggtggccagagagacgatattgccgtcggaatccagcgcgtaatcatggtgcaggatgtactggtcgcccagattgatgatcttgaccagcttgcctaggcggttcatgccgacgaaatgcttggtggaggcggagaaccacatgatgccgtcattgtcgaacagcagacggtgcgagcggtagtagagcaccgggatttcgccgcgaatcacaccgttcgcgtcatagtagtacatgaaatcctgctcgttggaatcattgccgagaatcgcgtacaggccattgccgagcgtggtgaccgtggattcgtcgggggcgacggcctgttcgagccgtacttcctcctcgccgagcagtttcgggccggtctgctcgatggtgcgcgtggtggcgttgccgtcggtgtcggtgatggtcagggtaatggtgttcttgaccttggggatcagtcccaacaccagaaactcgtgctcggtggaggcgatgtcattgctcgataccgtggtcgtctgactcgccgtgctggtaccgccgacattgccggaaccgtcggcgtcgccggcggcggcctcacggtatgcggcggccgcctcatcgctggtgatggcgttggccgtgtaatccgggtacccctcagcggaaacggtgtagctgacggtggaggcctgatcggtggtgaagtacacgtacatggacgtggtgttggtgccgtacgggttcaccttggtgtagatgctgtcgactgtgcgttctttggcgtcgcgctcgtcggcgatctcggtgtccatcatctgctggtattcgtcggtatagacgttctcgatctgggcgttgagccgctccacgcggcgttccttgatggaggcgctgacgtcgtcctgtgagaacaggcacagaccaatggcgatggctgcggtgacggctgctgcggatattttgaagacgcgactacggacggcagtggacacggggaaaccctcacgacagtatgggtaaacgattagtgaattacgtcacatacattatgccgcaggtcttggaaaacaccggccggaatgctgggagaatactgaagcttggcgggtcgccgagcggtccggtcctatagcagggtgaaccaagactgaacctgatgccagagcgtcggattgttggcgatcatcgaatcgctgcgcgactgcacgaagcaacttagtatggctatgcccagcgcccacaatacggccagcatcacgacccagcgcatcagccaacgccacggagtgacgcgggtgatgccatcgcctgaagcggcgtcgttggcccccgccaatgagcggctcggttcgcgcccattgaccagccacagtagccccggtatggacgccagcgagatcagccagccgaaatcggcggaataccgccatcccaaaccgccgacgcggctgtcgaatacgaccagcaccgccgccacggccaagcaagacatcagccatggccgcatgccgtgtgtttccaatctgcgcagcaggggcagcgccaaagccatcaaggtcagtggcgtggccgtgaaaatcgcgccgaccatcacctcgtaataaccccattgcggcatcggggcgggagagcccgccagccacgggaaacgatccatgaagcgcagcggcaggaacaggtaataccagatgttggcgggcatatccgcggacggggtggtataccgggtcatatcggatatggagaactgatacgcattgccgaaattgaacggggaatcgaaccgaaccatgttccacgccatcagaggcgtcacgacgagaatggcgggaatgattaccgccagcggcgcgcgcaacgcctgcaacggcttgatgcggcgtgtgcgcagaccggtgcccagcgcgcgaatctgcggccagaacagggggaacgcaagcaatgcggccaaggtgaacgtcggtcggcatccgaaattcgccgcaatgcacaaggcgcccaaggccagtcgtggcagggagagaggcttggcatcgcccgcctgccatcggtccgatggtctcagcggacggcgggacgtgtccgcgccgagccatagccatagtcccagcgacgtcaacgtcagcgatgcggcgaacggtatctgatagaagttcgtgcgatacagcaaataccccacttgcgcgctcaccaacgatgagaccactactaacgacgcggccgccaccgaagtcttcggcatcacacgatggatgacgcgcagcaccagcaaggagaagaagatgatgaacagcagcacgagaatatactcggcggcggatgtcggcagattatgaccggtcagcagacgataggggacgaacagcagcactgcgggcaacacgccaaaataggaataccagtgaccgtcataatacgcgtaatcccagtagagcggactggctccattggcgagtagctgggcacgtgtggctacgtcataggggtgctcggtggcggccagctgttcgggaaccggcaagtcgagccagggccggccggcgaccagcgcatcggccacatgcccatactggtcgaaatcataggtgtaatcgccggaaacgtggaagacgagcgaagacgcgtaccacagttcgtggatgatggatacgccgataagcagggtaggaatcgccagaagccccacgaaagcaagtcgttgccgagtgctggacgggtcaagcgtgatacgccacaggcgcgatcccggcctccagacggcaatcatcagcaacaccaaggccatggcgagcacgcgcatccaattgatgacgaacggtacgcgcacgttggcgcgggagtcggtgaccggtacgatcgcgccgcgctcttcctgaatccaaatacgcacgatgccggcacccggtgccttgacataatggctgcgaatagcgtcgggattcatcgactgggcctggccggtgatgccatcgacatccgcgcgcacatgaatggtcgccagcggtttgaagacttccttatcgtcgttcgcttcggattcggcctcggcctgctcacgggccttatcgatgaccttgctgctcgcggtatcgatgcgtaggtaatccgacgtgccgtccgcggtcagttcaagataggccttggtcggatcggtgacggtcaacatgccatcattccggcgcgtgagacccgaacccagcgtgttatgcacggcgttcgtatccgtgctcgctccgagcgtacgccagaacggcaggttgaacacgatgcactccatggcggcgatggcggcgacggcggccagcaaggcgatcagcaggcgcaccaaacgcagccggtgccgggtatccggacggctgggcaggcgccgttcatgattcgacggcatcggacggtctgcgcgagtgtggtctatggaatgcacgcatttattctataggctttattcgggcttgatgtcgggcaaacaagagacaatgtgaatcatgccaaaacgtacatcggaccatgggaagcacaaccgcacgccactgctgggcggactgaaggattcgatgaacgcgctcgcggccgatctgggactgtccaagccgaagaagcacgatacgaatccgttcggcgatgccttgcaggagaccagtgagcgtaaaggcggcattatcgacgaactgactcgccatgcagtggcgctgagtcctgtaatcaagcgacgcaccttccccgaattggagaacgtgccggaagggctggtgcttggatgggcgcagctgccctccaccagaggccgcggcttctcgcttggcattttccccgaccgcgatcattttgcgcaggtggcgttcgccgatacgcatggccgcgtattcgtgggcaccgaccccgacatggacgtgcaggatatgcaggcgcgatttatgttcggcaaggaaaaagaagtgacattgccggacggtgagcggctgggcgaaagcgacgagcctcgttcacgttccggtttctcccgtacagaccgtggcctgggaagtgcgctgcatcatgggcgtggtttggggcgtggccttggtcatggtgctgacggtgtgaaggccattaccggtggcgtggtggggcgtgacgacaccggacgcatgacgtggctcgcctcatggctcaaggccggcaaccggtacacgcttgagcagatgcgtgccaatctgccgcctgcgatgcgtcatgatttggaataccgcgatgccattaccatcgcgttcttcgccacgtatatgttgccgcagatcaatggtctgctcatcggattcggttccggcaatatcttccgccgtctcaaccgtgaggcgccaatcggtgcgattcgccgttcggtgcgtgacactttggcggcacgtgcccacggcatgcgggcctccggtctggaggatcatttcgccgatctgatgcgcgaagccggcgctctcgacaccacgccgggactggaagcggtgcatggcgccgagccattgcacctgtacacctcgacgtattcgagcggctatttctttacgtgggataagtccttggcattcgggcaggcgctgaaatccttgaagatcgaaggcaacctcaaccgattcgctgcggtgagcgcttggttggagcgcaacgcttccttgggacgcaaccctacggaagatacggtgacccgtgccgaggccgcgcaaatcgacatgaaactcatcgaaaaccctgcgattatggcgcttgacccgtatgatggcgagcaggagcgtcgggccgtgctgagcctggtcgatatcgccgcacgcacggctggacagattcgcagtgaattccccgatcctcgagatgtgctgacccagcagaacgtgccggattcgggtgtgacgaatgctgcgggcgctgaaagtactgagagtgctgagggcgctgtagaacggaccgataagagcgacaccaacactcaagccgctcgtccttcgtattcgccggcgaggagcgacgaatgggtgtatcgtcagaccctctcttcactgttgcgccggttacggttgccgtatcggtttgacgtggagttccggtcgcgcttggattcgggtgaagtggccattggcttcaccaccgccggcacctcgatgatgcccgatagccggtatgacaccactcgacgtacgtggcgtgcgctgagtagcgccgaacgcgcgtcaatgagcgccgcctacaacctgcgtgtcggcctgatgatggccgcgctaagtttcggcaccagcgaatccgtgcgccaggtgtcgttgcacatcgattccattggtcttgaagaggcgattgccgaacaggattccgccatcgaggcgatgatgagcgaggccctaagcgccttcgaacatctacgcagtggcgatttggggcgtgtgggttccaaagccgaccccaaagatggtgatttccatggcgacccgacccgccccatcacccatgaggagacgttcgggcagacggcgtccggtgacgaacgcggcacggccgggggagcaggcaacggtaccggaccgtctgcggatgctacggatcaggccgcggccgaatccgctgacgccgatggcgctgcgtccatcgattcgcagttcgaagacctgatgaagggcatcgatatcgacgaaatggcgttcggcatgccggacgataccggcgcaggcgacgacctgggcggtatcggcggcgagggcgtcggcactgacggtgctgatggggccgccggcatggacgatgatccgatgagtgtgctgcgccgcaatcccaccgtgcgcaatatggtcaccgtcaccttcacccgtgatgccttcctcaagcgactggacaccgctgggcttgacaatcccgaggaaacctaccgcatgttcggtgccgtgatggacgtggacggcgaaggtggtctgaaacccatcagcgccgacttcgacttggcggacagccggttctctcccaccggatcccaggaggagcccgaactggccgaccgtcaattcagcccggcgaccgctcacgtgctgggcgcacagaatagtgccggactggctatccagcgagtggacctgctgcagcatggcgtcaacgaattccacgatatcgccaggaacacgtcgctcggctccgtggaaaaggcccagcgagccatgcaggtcatcgaatcgatatgcgatcccgaactgaccgatttggcctctcaggtcaccagtgcgttgatcgatggcaaggacacgccggacttcacgttcacgcttgccgacgatcttgacaaggagcgtctgcgcgcccgagacatgctgttctcgggccaagccgatcaggccatcgaagcggccgaagcggccgtggcccatttggaccaggtgtatgcggcaggccatggcgtacctcgatacttcaattcctatgccgagcgcgtggtctacaaccggctgttcgccacattggacgagcgtacggtgcttatcccggacaatctgttctacgcgcacatggagctggctgacgtgttgagtcagatcaagggtgccgaggcggcgatcccgcatctcaaccgtatggtggcgtacgcgcccgcctacccgctctcacatctgaagctcgccattcaactggcccgcaatgaggattgggattcggcacgcgccgcctgcctgaatgctctgcgcgtggccttggaccgcgacgatgccgcgttcgcctactaccggttcgcgtacgccgaatggatgctcgaccggttcgacacagccgccgcagcctacattatgagcgatcacatcgctcccggggccattggttcgctggaaagcgaactgcaggaactggtttcccgtgcggactcgcagtgcataccggtgcctgaatcggtggaggccgccgcccatgtgcttgccacgcatgatctgccggtctggccgcatatcgaaatggctgacatcgtgcgtgacgccgctcgcgtgtgcgtggatgagggcatgttcgtgccggcccgcacgctctcggtggctgtggcccgcatgaatgacggcgaaggcgataacatcgacatcatccaagcccagttcctgcgctcgctatccgcgtagccgcctgaggggagttgacggtatagccggccgaggggagccgagcccgctaggatagacaaccatgagcacgaacgaacaactggcatgggatttcgacgatggggatgtggccgaggtccggcctgataccggtattgcacgttttgcccctggctccgaacaatggatagccgcactgcagcccactgacgacgacgcgatacgcctcgaccgtttcgacgtgaacacgatgaccgctgaggccgccgcccgcctgtgggctcgcgtggccgcatgggtggaatccgatcagatcgcctactacatcgacgactcacccgtcagctccgacgccgcttacgatgcgcgcatgcgttgcctcgaacgactcgaagcggcgttcccctcactggacaatccgcagtcgcccacccatcgcgtcggcggttccttctccaacgacttcgcctccgtgcgccaccccagccgcatgatgagccttgacgacgtcttctccatcgaagaactcaaggattggtacgactcggtgattcgcgacctcgattggcccgaatccaagcccctgcccatgagctgcgaggtcaaaatcgacggcctcgccctgaacctcatctatcgcaacggcgtgcttgaacagggcctgacgcgcggcgatggcgttaccggcgaagacatcaccctgaatgtgcgaaccatcggctccattcccgccaacctcggcggccccaaggaagacgttccggacttcgtggaaatccgaggcgaagtgttcatgcgttgggatgatttccacaccctgaacaacgagcaggaggacgccggacgagcgcccttcgccaacccacgcaacgcggctgccggctcgctgcgtcaaaaagaccctcgcatcaccgccacccgtcgcctgagcttctatgcgcatggtctggggcagctcacttgggggccggaccatccgcgcggcacccatgacgtggtcgccgaccagtcgcaggcctacgatctatacaccaagtggggcgtgccggtctccccgcacaatcgtgcggtgacctcattccaggagatcctggacatgatcgagtactacggcgagcatcgtggcgacatcgagcatgcacttgacggcatcgtcgtcaaggtcgatgacctgggcctgcagcgtaccctcggcgccacttcgcgcgcgccgcgctgggccatcgcctacaaatacccgcccgaagaggtcaacaccgaactgctcaacatcaccgtgcaggtggggcgtaccggccgtgtgacgccggtcgccgtgctcaaacctgtctacgtggccggctccaccgtggctcgtaccacgctgcacaatggatttgaagtcaaacgcaagggcattctgatcggcgacaccgtggtggtgcgcaaggccggcgatgtgattcccgaactggtcggcccggtgcttgaacggcgcaaagggcgtgaggaccagctgcgcgaattcgtcatgcccgagttctgcccttcatgcggcgcgaaactgtcacccgccaaggagggggacaaggacattcgctgcccgaatgtggagagctgcccggcccagttgaccgagcgcgtgatttcgctggcctcacgcaaggcgttcgacatcgagcacttgggcgaacaatcggccatcgctctgaccaacccggaggagaaccggcctgattcggtggcgacctacgcgccgaacatcaccgaggttctggtcgcccccggcgaagagcctgacccgtacgagccggtggaagggctggaattgccggccgcgcagaagccggtgttgtccaacgaatccgggttgttcaacctgaccgccgccgatctgcgcgacgtgcgcgtgtggcgtgaggccgcaatcgtcgaggtgcatgagacggtcggtgcgaacggtaagaagaaaaaggtgcgtaagcgtgtcggcggctctggcctgtggcatcaggtgcctgctttctggaccgcgcccacgccggccaaaaagctcacggccaagcagctggccgaacgcgcgcaaggggaggccgcaatcgaatctgccgaaacacagggaggtaccgccagcgagacgaccggcgcacctaccggggctgaggcgccacttggtactatgccgggctttgccgcagcctcctatcctgagtatgacgtgccggccgacgcggttatcgtgcgcgtggatcacaagaccacgcgcactggcgtcacggatgtaccggtgatcattcggcccggcgaaaacacgcgcaagatgttcgacgaaatggacaaggcccgtcacgccgacctgtggcgtgtgctggtcgcgttgtcgattcgccggctcggtccgcctaccgcacgcctgattgcctcggcgatgggctcgctggcagccatcgaaaacgccacgattgaagatctgacggccatcgacggggtgggcccggaaatcgccgaatcggtggtgaactggttcgccgccacccgcgaacccggtgactggcgcggcgcgactttgcgtgcttggcaggccgccggcgtgggcgtcgacgaggccgagaccagttcgttgccgcagacgctggccggcaaaaccgtggtggtcaccggttcattggagggctattcgcgtgattccgccaaagaggcgattatcgagcgcggcggcaaggcggccggttcggtgagcaagaagaccgattacgtggtgattggcgcaaacgccggctccaaggccgccaaggccgaggaactcggcatccccatgctgagcgaaacccaattcgcccagctcctagccaccggcaccatctaaaatagccccctcagacgcttcattaaccccctctgatgagggggctgtcagcctttaggctgactgggggagagaaaaagcgaatcccgccccagtgtgacttactccactccctctggcatgccgccgcatcacacgctagggtagaacaggccctaaaggaggatacggatttatgagcgacgcacgtcagatcgaagccgacatctacgaacgcctgagcaaggtcatcgaccccgagctcggtcgttcggtcaccgacctcggcatgattgccgccatcgaagccgcgcccgcatcgtcggacgccggcacttacgacgtcaccgtgcacgttgagctgacggttcccggatgcccactgagcgagaccatcaccagccagatcaatggcgcggtcagctcctatccgggcgcacagctgctgcctcatatcgaagtcggttcgatgagccgtgacaagctggccgatctggtcgccgacctcaaggccgaacgcaagcagaaccccttcagcaaaccgggtgtcaagacccgcatcttcgccatcgcctccggtaagggcggcgtcggcaagtcctcggttaccgcgaacctggccgccacgtttgcggccctcggcttcgacacggccgccatcgacgcggacatttatggcttctcactgccgcgcctgttcggcgtgcatacacagcccaccaatctgaatggcatgctcatgccggtcaccgcgtggggcgtgaaactgatctccatcggcatgttcgccggtgctgaccgggcgattctgtggcgtgggccgcgactgcagcgctccttggaacagttcctgtctgacgtatggtggggcgagccggacgtcctcttgctcgacttggctcccggcaccggcgacatggcgatttccgtggcccaggcgctgcccaacgccgaacttgtggtggtcaccaccccgcagccctccgcctctgacatcgccgtgcgctccggactcgtggccctgcaggtgccgatgaaggtgcgtggcgtggtggagaacatgagctactacgagcacaagggcgagaagctggagattttcggtgccggcggcggtcagcgcgtgtctgaacagctcactcaggcgctgggctatgacgtgccgctgatggcccagctgccgctggaacccgaagtgcgcgagaccggcgaggccggccggccggcggtgctggacgccgacggcgctttgcgtacggatggcattggccagaccttccgagggttggctgaacggctgttggcagtgtgagcctgcgcagcctcacacttttgtaggcggcgttggcgtttaagtccggttcgctgctggtgggcgaatcgcttgaccacagcacccgcgacctggtggtcgaggcaatggagcgcactgtcggcgtggataggctcattaacctgcaggccattcacatggacgaggacgccgtgccgcgctgccttggtatgaatgggagatctacgttgagcccgatatctggcgggtgcctcgcagtaaataacggcatagcgcattgtcggtgcgatgctaagaggtaatggcccatgagcggttccaatcggcgagattgcgttgccgggacaccacgacatgggccatctcgataaaacgatgccgcgtgtcggctgttctcaggtcatccgcagtgacgagaatgacgatccagccgagcagttgcaatgcgtttcgctttgccgcgtcgattcgcatttgtgccggatcggcgtgataggctccctgatattcgaacgcgacgcggcagtccggatatgccatatccaatatgacgtatgagttgccgatattcacgcgatagttggcggtggggcatcccaagcctgaatccttcagcatcccaaacagcgtgttttccggcggagaatccgtgttctctgtcatgtagggcagtgcctcgtggcatttgttacgacctatgaaccgcggactgatttccaagtaagtatcgaaatccttgcgagtggccattctgcgccgtttatcgcggctcatcaaagaggctccaatggccgcaagttcctccaacgtagagtattgggccatctgagcccacatcatgaccggcgaggcaatccagaactgttcataatcctttttgcggatatccagttttcccttaaacacatggaagaccacgcctttgattcgtctgcgtttgttggcactggaaacacaggcgtgcacggcatcaacagatagcgtgcaatgtcgggggatgggcgcgccgtagtagttggccgcattgatgtatcccaccagcaatggacctttcgaacggcgcgcagcatcattgcagcgttcacgttctgctcggcgtcggccgacaatatcctcatgcataaaagagctcatggtgcgaccgtaaagctaatttggacttgaatgcaagccaggcagggcaatgtggttccagcttatggagttatccacattgtctatttgcgcagagaacggttctcagtagtatctgtgcgctcaaatgaacaagaacataacaatctcacatcatcgcaaatggcgacatggcagtgattagggcatattccatgtgtgcttcgggcgtagagaagtgtgcacagacattattgagaaccgttctctgcgcgcctatctggctacgacctcggtgggcaggagccccgtgcgctggaacggccggtcctcgatctggtcaagcactagggtagccaagctgacgccgaatgcgtccattggctggcgcacggtggtcagctgcgggcacgctggcgtcggcgtcgacgtcggcaagtacgacggtccgatgatataggcgattcgtcgatacccgcgccccaacatatgctcggtgagcttgcgtgaagcgagtcggttgtcgatgtcgacggtggggaaggggtggcgctgccatagccgacgccggaaatggcgactggcacgctgatattggcgaatccctgaaatagcgggtcgtccttatgaaatgtgttgagaatccacgggccgtatcgcatggcgcagcgcagtctgcaccgccccgccgccgaaccaaccccggcaagatcgcgcgccgcgccggcaccactatcctcgccctgctgttctgcgtcgtatggttcttcccggtctactggatgattatcaccgccgtaaagccgcgcgatgagatcatgaccacgacccccgtgttctggcccatgcacctctcgatcgtcctgtcgattattgtcgcgttcttcgcgtgcacggccctgaccctgtaccgcttccgcgggcgcaagccgatcatggtgttcgtgctggccatccagatgacctctggcggcatcatcccgcagatcatcatctacaaccagctcggcctgctcaacaaatacagcggcctgatcctggcgtacatcgccatggtgctgccgttcgcgatctggaacatgcgcgggttcttcctgaacatcccgaaggacatcttcgaatccgcggccgtggaaggcgcgaacgactggcagatcctgtggaagatcaccttcccgctggccgcgcccggcatcgtctcgacctcggtgttcgcgttcatcaacgcctggaacgactacatgatcgcctatacgttcatgaaggaccagtcgaagtacacgctgccggtatggctgtcgtccttctcggcacccaccatgggcaccgatttcggcgggcagatggccgcttcggtgaccttctcgttgccggtggtggtgttcttcatgctcatccagcgcaacatcatgaagggtgtgacgaccggtgccgtgaaatagcgtatgccgccgtacctcaccaaacgattcgtccgctgatggcggcgtgaccgcgtgtcgcctgccgtcagcggatgaacgataataaaaacagtatgaaaggaacagctgtgcccacattcgaatataaggctgatgccgcaacgccgtgtctcaccctgattcccgctccggtgacattggaatacacgcatggcacggctatgatcgggtccttggtgacgatcgagaaacgaattcccgaatatgccgtcaccgaagatgccgatgagacctgggaaacgctgccaatcgagcagctgtccagcgaactcgagcgttactgcggcgtcgccgtccgtacgcgccgagtactcacagccacagatgaagccgacgccggtgccaatgccgccgaaaaagcgcgagatgcgggcgtgggtgcgggtgcgggcgcgggtgcgccggcagcgatgaacggcaccgtcatattgctgtgtgtggatgcgcgattggcgcatgacgaatacacgctggatgtgttcgcctcagataccatcgccgtgcgtggtggcagcgaaagcggattgcggtacggcatgcagacactgcggcagatgatcaggcaaacctcgcggaccttgccctgcctgcatatccaagacaagcctgcgttcgcggtgcgcgcctacagtcttgacgtgacgcgcgggcgtgtgccgacgatggcgttcctcacctggttcatcgaccagctggcgttgtataagtacaaccaattccagctgtacgtggaacatgccttcgctttcggcgagctcagcgaagcgtggcgcggcactgacccgctcacggccgacgacatcatgttcctggacgaatactgcgcacaccacggcatcgaactggtgccgtccttggccactttcgggcacatgtatatgaacctgcgcacccgtgaacatcgtggactgggagagttccccgaagacgccgaccgtccgttcagtttcatcgaacgaatggaacaccacacactgaacgcagccaaccccaagtcgcacgatttcgcctcgcgcctaatcgaggaatacgcgccgctgttccgctcgcggtccttcaatattggtggcgatgagactttcgacttgggccgtggccggtccgtacaggactcgccgggcgccagtcgcgatgagctgtataccgatttcgtcaaagacctatgcagcacgcttgcccatcgtggtctacaaccgatgctgtgggcggatatcgcgctcgagaatccgcacaccatggacttgctgcccggcgacatcacgatgctcaactggatgtatgagccggatatcgacgaaagcaagatccagaccatcgcatcacaaggccgccgccaattcgtgtgccctgccgtgcgtgcgtggagccggttcttccccgactatgacggtgcctggctgaacacgtaccgcatggcggtggctgggctcaaatatggtgcggaaggcatggtggtcaccgattggggtgactatgggcatgtcaatgatccgcggttgagcgtgccgggactgtgctacggtgcgcaaaacgcgtggaacccggttgcaattgacgcatgcgaaatgaaccatcggatttctaatctggcgtatggcgacgaatccggttggcttatggattcactcgctcgcatcgactccgatggagtgtcgttcccctgggacctcgccgtgcaagtgctggaactggaatacggttccggcaccggcatgctgaatacggatgtggcatcgtatgtggaacggtcgtgcgggggagagctcatgtttgaccgtgcgctgggatgcgccgacgcgcgccgccgattgctcctgcggaaccatgcccgtctcgaacgacgccgggattgcgaccgggcgttgattgattgcggcagtgcggttgtcgcggtgctcgatggctcggcacgaggaggattgaacccggagctgctgtgggtgatgctggatgggcagcggttgttcaatagactgggtgaggaactgctggtattggctggcggcgaggacgcctgtggcaccaaggatgtgaccggccgtgcgctggatgcctcgcgccgcgcccgtcttgccgccgatttggagttgtggttcgaacggtaccgtgtgcagtggctgtccatcggccgttacgccgaattggcgcgtatcgcccatgtggtgtggtcgtttgcggacatattgcgtaggggagcgctatagggggctcgcagaaattcggtcctgctgagaacaatgtgaggcttacgcgccgtcaaacgcacatggtgatttcaaaaatggcgaattgctgccattcttgcacctgtgcgtttgatgggaaatgtgcgtatgcctcacattttttgcataaagcatgaaaatgtgtgagaccggcgtcaaggtcgaattcgagaagaaggccttcgaacagattcgccagaacgcctcccaggtcctcaactccgacgacgctccggacgttacggaatacaacaagggcaacgccacgtccggcctgctcgccagccaaggcctgctcaccaacctcaacgattacgtgtccgaatatggctgggacaagattatcaccggttccttggccgacaccggcaagtacgatgagcaaggcatgatgggctccggcgactggtacggcatcaccaccggcgcggtgaagtaaggtcattcgcacaacaggcaattcaatcaacaagcagcacatattgattttggtttcggctgccttgttccctggcggtcgaaaccacctctccaccaaggagcagcaacaatgaagttcaccaacggctactggatgattcgtgacggcgtcgacgccctctacgctcgtgaagcctacgaactggcggcggatgccaccaccgaaagcctcaacgtcctcgccccgacctccgtggtgcgcggccgatacgataccctgaacctgcccacattcaatgtggacatcaccacacctgcggaaggcgtgattcgtgtgtgtgccgaacactggcaaggcgccaccgaataccccggattcccgctcaatgccgacgaacccggcaaccgtgattacgtgaccgttcaggcgaacggcaatggcgacggcgaagtcggcgtcaatggcgcggatgtcacgctgaccactggcggacttaccgtgaaggtcgtcaagggcgcccccctggaacctgaccttcatcggcgaggacggcaaggtgctcactgagtccgcaggcaagtcgctgggccgattcaagctcggtgccgaatcgaacgtcaccgcccagccggtcagcgaattcggtgtgaccatggacggttccgcccgtgatgaatccgacgtgttcattgccatccagctgcatctgtcggttggcgaagacgtatacggcttgggcgaacgcttcggcgcttacgtgaagaatggtcagagcgtcgacatctggaatgaggatggcggcactgcttccgagcagggctacaaggacatcccgttctacatgacctccaatgggtatggcgtactggtcaacaaccgcggccatgtctcctttgagatcggttccgagaacaccgaggccgtgcagttctccgtgcccggcgaggccatcgacttctgcgtgatctatggccccacccccaagcagattctcgaccgctacaccaagctcgtcggacgtccggcgaatgtgcccgcatggagttacggtctgtggttgaccacctcgttcaccaccaaatacgacgaggccaccatcaactccttcatcgacggtatggccgaacgtgatattccgctggcggccttccactacgactgctactggatgcgcgagttccattggtgcgatttcgagtgggacaagcgtttcttcggcgacatcgaatccacgctgaagcgcctgcacgaggacaagggcctgcacatctgcgcttggatcaacccgtatatcggccagcgcggcgaaatgttcaaggagggccgagacaagggctatctggtgcgcaagcccaatggcgaagtctggcagaccgacttctggcaggccggcatgggcttggtggacttcaccaacccggccgcccgtgaatggttcaaggacaaggtcaaggcgttgctgaatcagggcgtggacgccatcaagaccgatttcggcgagcgtatcccgcgcgacgtcgtctggtatgacggctctccgaagctctccatgcacaactggtacacccagctgtacaaccaggccgtgttcgaagccatcgaagaaacctacggcaagggcaacgcctgcctgtatgcgcgctccgccaccgtcggcggccagcagcagcccgtgcattggggcggtgactgcgagtccaccttcaatggcatggcccagtccttgcgtgccggcctgtcgctgacctcctccggcttcggcttctggagtcacggcatcggtggcttcgaaggtgcgttcccggatccggccgtctacaagcgttgggtggcgttcggcatgctcggctcccactcgcgactgcacggttccaccgtgtaccgtgtgccgtggctgttcgacgaggaggacgagaagaacggcgtcgcattggtgcccggccagaccgccgtggatgtggtgcgcgagttcaccaagttcaagcttgaactcatgccgtatgtctaccagcttggcctgcagcctcatgtgaacagtactccggtcatgcgttccatgttcgtggagttccccgatgacccggcatgccgcacgctggaccgtcagtatatgttcggtccgtccatgctggtcgcccccgtgttcacctactccggtgaggtttcctatcgattccgctgtgggtgcgcgacggcagcgtaacgacatgaacatttcagcgtggtgctggaacacttcggtgttgcggcaccacgcttttgtgctgatatggggatttgtactagtcgaatccgcgaaatgttcagcaaatgttcacgtagcgaaatcggcatagaatgcgaacaaacgcataacggcacggtgctgttcatgcgtacaccaacgccagacgaaccgccggaaagaaggggtctccgtgattgagacagtggacgatatcaagacgattgcgaacgtcggcacgggaaccatgggccacgcgatcacgttgcagttcgcgttggccggatatccggtgcatctggtcggccgcggcgaggcctcgctggagaaggcgatgaaggcgattcgttcggatgccgaggacttcgccgaagccggactactcaaggacggcgacaccttggacgcggtgctggcccgcatcaccggttacgccgactatgcaagcggcgtggcggacgtggacttcgtcatcgaatccgtggccgagaaccttgacatcaagaagtccgtctgggccgaagtggagcacgccgcccccaaggacgcgattctgtccacgaacacctccggcctgagccccaccgcgctgcagtcggtgctgaagaagcccgaacgcttcgtggtggcgcacttctggaaccccgcgcagttgatgccgctggtcgaagtggtgccgggtgagaagaccgatccgaaggtggtggacatcaccttcgacctcatggccaagatcggcaagaagccggcgaagatcaagaaggaatcgctgggctttgtgggcaaccgcctgcaactggccgtgctgcgcgaggcgttctacatcgtccagcagggcatcgcggacgcggccaccgtggacgacgtgatgaagtacagtctcggccgtcgctggaatctggtcggccccctcgccagcatcgacctcggcggcctcgatgtgttctataacatcagcacttacctgttcgacgatatggacaacggcaccggcccgagcccgctgctcgccgagaaggtcagggaaggcaatctcggcgccaaaaccggccagggcttcttctcctggcagggcgaggacggcaagcgcatcatcgaatcccgcaacaaggccctgctgcgcgcgctgaagaacgacgccgcggatgccgccgctgcgcaggcgtgaggcataaatatcaaggatcggtgacgacgatgacgtccacagaacacagcacgcgagccgacatgctggcccatatgggcagccttcagcaggccgcctacgtgcgcccgatcgaatactaggaaggccgagcccacggcctcaaggccatcgaggtgaagaacggtccgttgcgtttcgtgtccatggccgaccgcgccctcgacgtctgccagttcgaataccgcggcgagaacctcgtactgcgtcgcacaatcaccagcgtgtacggccggctgtcgatcacggtcgaggatgaggtgaccaacgaatccttccgcgacgatcagtcccgaaagcgtgtacctgcacgagctcgccgccgacgagaacggccgcagcttcgccgccgtggtcaaccgcaagctcggactcggagtcgtcatcgacttcgacgccagcctcttcccatacttcatggaatggaagtcgacgggtgcgggcgactacgtggtcggcctcgaaccctcgaactccagcgtccacggccgaggctggcacgagcagcgcggcgacctgcacgccatcgccccgcaggccagcgaacgcaagtccctgaccttcaccgtcatcgaaggcgaggccgcgattgacgggctcatcgtccgccgcgacgccctgctcggctgaattgtgagataatatcggccgatatgtgaatggctgattagcgtggggagcatggttacctgggattcggaacagtatctgcgattcaaacgggagcgcacgcagccggcgcgtgatctggcgatgcagctgccgccggacgacggcagcgtcacgcgcgtgctggatattggctgcgggccgggcaacagcacggccgtgctgcgcgagcgctatccccatgccaagattctcggcgtcgacagctcgccggtcatgatcgagacagcgcgcaaaacctatcccgacatcgatttccagctgtgcgacgtgtccgcgcggctggacgagctgccggccgacttcgacgtggtcttctccaatgcctgcatccaatgggtgccggaccatccgcatttgattcccggactgctcgcccggctcagggtcgggggagtgctggctgtgcagacgccgatgaactatgaggagccgattcaccgcatcattggaggtatcgtgcactcgcccgcgttcgcggacaagctgccgcagcaacgcgagttctacaacctcacgccgcccgaatactgggagctgctgcatgcgcatgccagcgccttccgcatgtggaaggtcacgtacatgcacacgctgccctcgcatgaggcgattatggactggtatcgcggcaccggcatgcgtccgtatctgcaggcgcttgacgacgccagccgcaagaagttcgagggcgaagtgttcgcccaggtccgcgaggaataccccacacagtcggacggcagcatcatcttccccttcccgcgtttcttcttcctcgcgactcggtagaagctcgccggattcgcgtactgggcggcgcgacctgtttcccgcgccgtcagctgtgggttgacctcgctactgggcttgcggtgatgccgctggctgctgcgctgcttccgattgcgatggcatttgcatatgcggcgcaatcctcgggactgttcggcatcgggcttggtgcggtgaccatgatcatcggcctgtggatgctgctgcggcggcgctggacggtgccggcgtcgggcgaagattccccggacgatgccgttcctgcagtcgagatcacggctgaaaccgaggcgtagggcgtcgcaatgcctgtttacaatcgacccgaatggtctttgtggtgagaagaggcatatggtgaggctgccgacgttgaacgtgaattggagtcgcgatcgggtctacgtgattcggcgcggagtggtcgcctgctgtatcctgttctgcctgatcggcgccggagtcgagaccgcggcggcgcagcgcagctggccgcgagccgacaccgcaaccgccgccgcaaccgcagcggcgaacgagcccacggccgttacccgcaagcaggttcccgatagcggcaaacagggcgggtcgcggaagacgcagaacacgcagaacggcgatgacaaagccgcgcaaagcgtggactggaagggaccgaccggcaaacagcccgacctatcccagtactccgacctgagcgtggaggtcagtctcgccaaacaacgggtgtacgtcaagtccggtggccagaccatttatacgatgatcgccagtaccggcgtcgacgacgccaccccgcacggctcgtacaccatcgatacgcgcggtgaacacttctacaatgccgaagaaggcatgggcgccgactattgggtgcagttctacggttcgtacctgttccactcggtgccgaccggcgaggccttcggcgactatctgccggaggagggtgccaaactcggccagcccgcctcgcacggctgcgtgcgcctggccgtggccgacgcgcaatggttctatgaccaggtgccggacggcacgctggtcaccatcgcgtagggtggtctctccctcagtctcgttgcgctcgacagctccctcgtcagagggagcttatcagagggagcttagctgattagcgcgcttcgggcgggcggtattggtcgtcggcggtgaagcaggtgcggtagatcatgaccatgatcaggccgtcggccagcagggtcagcgcggcgatggcgtcgaggaccacgaactggtacttggcggcgttgagcgggtcgccgccggcgatcacctgaccggccatcatgcccgggatcgtcacgatgccgctggacgccagcgaggcggtggtgggcagcaggcccaagcgaatcgacgagacgatggacgggcgggccgactcccacggggtcgctcccagcgccagcatcatatccacctcgtcacgccgctcctccatgctctcgtagaaacggctcaatcccaccgccaaggcggttacggtgttgcccagcagcatgccggtcaggggcaccaccagctggggcgcgtaccacgggtgcgggcgcacgatgagctcggtgaccagcgccagcatcagcagcatggtgatgaccaggctcaggaagatcggcccggcaaggcccttggggatgccgcgtgcgcgggacatcacgatctgcacggccgccaccagcatgaccgccatcagggagaacaccatccacacgttgttcgaccggatcacgtagccgatgatgaagcccatggcgcacagctgcaccaatgcgcggcacgacgaccacatcagggtcttgccgatgcccatgtgcatcagttcgctgatgatggccgccacggccaccatgcccagcgcgatgagcagaccccagatatcgatgttgtaggaattgcccagatcgccgctcatgcctgcgtctcctcattttcatcggcgccgtcaggcaccgcgttcgcgtcctgcgccgccgagtccgtcatctcgcgttcggtcagccgccccttgtccagcgtcagcgtgcgggtggcccgtccgtccggcggacggtggcggatgcggatgatcgccatgccgcgtgtggcggcatccgccatgatcgtagccaccttggctgcgttgtcgtcgtcgagaccggcatctacctcgtcggccagcagcaccttcgggtcggtgagcagtgtgcgggccagggccacgcgggccgtctgcccgccggacaggtcgtgcggggcgcgctccagatcgatgtcctcgcagcccatcgcgtccaacgtcgtgcggatgcgctcgtcgggcagcagctgctcggccttgccgcccttgccgcgaatcgcgagcgtccagggcaggcggatcgcctcggccacgttcttgcccgtcagaatcggcttctgcggcaggtaggcgacatcccgccgccactgctgcggcgtgaactcgccgctgcccttgccttcaagggcgaacgcgccgtgcgcatgcgggttgagccgggcgcacgcggtcaacagactcgacttgccggagccggacggtcccaccagatcgacgatctcgccgcgctccacagcaaaggacaggttctcgaacaccgtgcgttcgtcgtccgccggcgattgcgcggggatgacgcaggacacggatatggcttcgaagaaggatcgcatattcatccagtctagccgggggcacatgggaaaccccagcgttcacttcctgtatacccggtgtggcataatagccgaggcaatttttgggctttgcctaagctagtttgaatttgaaataggtgaataacgtggcacagactactaacgacatcaagaacggatccgtcctgaacctcgacgggcagctgtggaccgtcatgaagttccagcacgtcaagccgggcaagggccccgccttcgtgcgcaccaccatcaagaacgtgctctccggcaagatcgtcgacaagaccttcaacgcgggcatgaagatggaattcgagaccgtggacaaccgcactctccagtactcctacgaggacggtgacaacttcgtgttcatggacatgaccacctacgatcagatcatggttccgaagacccttctgggcgacaaggccaagttcctgctcgaaggcaccgactgcctggtctccttccacgacggcaccccgctgagcgtcgatctgccgggctccgtggtcctgaccatcacccacaccgagccgggcctgcagggcaaccgctccaacgccggcaccaagccggccaccgttgagaccggagccgagattcaggtcccgctgttcatcaatgagggcgaccgcgtcaagatcaacaccgaggacggttcctacaccggccgcgagaacaactgatctccgcatcctcaacagacgaccgaccgtataaaggactaggacagcagcagtatggcacgttccaccgcgcgcaaaagggctctgaacaccctgtacgaagccgacgaaaaaagccaggatattctctccctgcttgacgagcgcatcgcacatcccggtgcccagaccccgcttcccgactatgccattgaaatcgtcaagggcgtggccgagcaccgtcgtcagatcgacatgaccctggacgaacactccacgggttggaaggtccgccgtatgggcgtggtcgatcgcaacattctgcgtatcgccgcttgggagattctgttcaccgatgatgtgccggacaaggtcgccatcgacgaggctctggcattggccaagaccctgtgcgatgacgattcgcccgctttcatccatggcctgctgtctgcggtgtgcaccgccaagaatgcagcaccagcaccggagtccgtggcagaagaggccgatgaggaatcgtccgattccgctgccgccgcatccgagccgaccgatgagggcgatgtttccgattcgcccgattcgtccggtgcatccgacgagcctgctgccccgtccgctgagattcagccgacggtcgattagtcatttgttgttcagcctccccattcgggaggctttttcatgggcggacacttgtgccgccgtacattctcaagtcggcaccttgccgacagccccgccagcgggggtgagactttgcgtccaacggcgtgtgagtctgcgctggtcgttaaccttggtacgaatacccgaaaaacataagggggttttggtgagccagaacgagtccgggaccatcgcaattccgatgtatgacaaggacgatgcagtcctcgttttggaagacggacaggtatatgtgggggagccatacggcgccctcggcgagacgaccggtgagatcgtcttcgccaccggtatgaccggataccaggagacgctcaccgatccgagctacgatcgccagatcgttgtgcagacgttcccgcacatcggcgataccggcgtcaacagcgaagaccctgagtcctcccgcatctgggttgccggatacattgtgcgtgatccctctccgaacgtgagcaactggcgtgccgaaggcagcctggacgacgacctcgccaagaacggcatcgtcggcctgagccacatcgacacccgcaagctggtgcgccacctgcgttccgcaggcgtgatgcgcgccggcatcttctccggcgacgccctgaccgatcaggccaccggcgcgctcaagaccatcgagcagctgctcgaagacgtcaagaacaccccgcagatgcagggtctgagcctgtacgacgaggtgtccaccaaggagacctacaccatcgaaccgtgcggcgagtacgaaggcaaggagccgctgtacaccgtggccgctgtggacctcggtatcaagggcatgaccccgcaccgcatggccgaacgcggctgccgcgtgcacgtggtgccctccaccatcaccttcgccgaaatcgagaacctgaacccggacggcgtcttcttctccaacggtccgggcgacccggaacaggccggtcccgaaatcgagctgctgcgccaggtacttgacgccggctacccgttcttcggcatctgctttggcaaccagctgctcggccgcgcactcggcttcggcacctacaagctcaagttcggacaccgcggcatcaaccagccggtcaaggatctgaccaccggcaaggtcgaggtcaccgcccacaaccacggcttcgcggtcgacgccccgatcggcaagcaggtcgacgcgccgtttgaaaacggcaagtacggcaaggtgttcgtctcccacatcgatctgaacgacgacgtggtcgaaggcctgcagtgcgtggacatccccgcattctccgtgcagtaccacccggaggccgcagcaggcccgcacgatgcggcctacctgttcgaccgtttctgcgaacttatgaagaacaactccaaggaaggtaagtgatatgccgaagcgcaccgacatcaaatccgtgatggtcatcggctccggcccgatcgtgatcggtcaggctgcggagttcgattactcgggcacccaggcatgccgcgtccttcgtgaggaaggcatccgcgtcatcctcgtcaactccaacccggccaccatcatgaccgacccggagatggctgacgccacctacatcgagccgatcgccaccccgatcctcgagcagatcatcgccaaggaacgccccgacgcgctcctgcccaccttgggcggccagaccgcactcaacgccgccatggcgctgggcgaggccggcgtcctgaagaagtacaacgtcgaactgatcggtgcttccctggaagccatcgaccgtggcgaggaccgtgaactgttcaagaaggtcgttgacgaggccggcgccgaatccgcccgctccgacatcgcccacagcatcgaggaagtcgacaagatcgccgagaagttcggctacccgctggtcgtgcgcccgagcttcaccatgggcggcctgggctccggcatcgcccacaacgaggaggagctgcaccgcatcgccggcgccggcatccattactcgcccaccgacgaagtcctgatcgaagagggcatcgagggctggaaggaattcgagctcgagcttatgcgcgaccgcaacgacaacgtcgtggtcgtctgcccgatcgagaacgtcgacccggtcggcgtgcacaccggtgactccatcaccgtggccccctgcttcaccctgaccgaccgcgaataccagaagctgcgtgacatcggcatcgccatcatccgtggcgtgggcgtggacaccggcggctgcaacatccagttcgccgttcatccggacaccggccgcatcatcgtcatcgagatgaacccgcgcgtctcccgttcctccgcactggcctccaaggccacaggcttcccgatcgccaagatcgctaccaagctggccctcggctacacgctcgacgagattcgcaacgacatcacccagtccacgccggcctccttcgagccgaccatcgactacgtggtcaccaaggtgccgcgcttcgctttcgagaagttcccgggcgccgaccccaccctgaccacctccatgaagtccgtgggcgaggccatggccctggccggcaacttccaggagtccctcggcaaggccatgcgctccatcgacaagcgccacatgggcttcaattgggatggcgagaagccgtccgccgaagaagtggccgaactgcttgaggccatccacaccccgaccgaacaccgttacctgcagcttatgcgcgccatctggggcggcgccacgctggagcaggtgttcgcggccaccaagatcgacccgtggttcctgaagcagatcttcctcatcaatgagaccgccatgacggtgcgtgaggccgaaaccctcaccccgaagctgctcaagaaggccaagctcgccggtctgtccgacgtgcaggtggcccacctgcgtggtttgggcgatgaaggcgagaacaccatccgcgaactgcgctggacctacggtctgcgcccggtctacaagaccgtcgacacctgcgccgccgagttcgacgccgccacgccgtactactacagctgctacgccgacgaaaccgagctgcgcccgcgcgaacgcgaggctgtgatcatcctcggctccggcccgaaccgcatcggtcagggcatcgagttcgactacacgtgcgtgcacgccgtgcaggagcttggcaaggactatgacaccatcatggtcaactgcaacccggagaccgtgtccaccgattacgacatgtccgaccgcctctacttcgagccgctcaccttcgaggacgtgctcgagatctacgaggccgagaagaagatgggcccggtcaagggcgtcatcgtccagctcggcggccagaccccgctgtccttggccgcgcgtctgaaggccgccggcgtgccgattctcggcaccaccccggaatccatcgacttggccgagaaccgtgagctgttcggcgaagtgctcaagaaggcggagatgaacgccccgcgttacggcaccgccctgagcctcgaagaggccaaggaagccgcccaccgcatcggttacccggtgctcgtgcgcccgagctacgtgctcggcggccgtggcatggaaatcgtctacgatgacaagcagctcaacaagtacgtggaccgcgcacttgccgaggccaaggccgataccgtggtctccggccgcctgccttccccgctgctcatcgacaagttcctgcaagacgccatcgaaatcgatgtcgacgcactgttcgacggcgaggaactatacatcggcggcattatggagcacgtcgaggaggccggtgtccactccggtgacgccgcctgcaccctgcctccgtccaccctgtccgatgaccagattcgtcgcctgcgtgaaggcacctacgccatcgccaagggctgccatgtgcagggcctgatcaacgtgcagtacgccttcatggccaacacgctgtacgtgatcgaagccaacccgcgcgcctcccgtaccgtgccgttcgcctccaaggccaccggcgtggcactggccaaggctgctgcccgcatcatggccggcgaaaccatcgccgatcagcgtgccaacggtctgctgctgcctaagggcgacggcggcgacatccaccccggccagcaggtcgcggttaaggaatccgtgctgccgttcaagcgcttccgcaccccggtgggcaagaccgtcgacatcctgctcggacctgagatgcgttccaccggtgaggtcatgggcttcgaccgtgacttcccgcacgccttcgccaagagccagctcgccgcctacgacggtggcctgccgacccacggcaacgtgttcatctccgtgaacgacaccgacaagcgtcagctgccgttgatcgccgttcgtctcgaggagcttggattcaagctctgggccaccgagggcaccgcctccgtgcttcgccgttacggcatcgagtcgaacatcgtggacaagatcagcacccgcgtggacaccgatccggaagccccggtcgaggtgcatcacgctgccggatccgtgggcaagaacgtggttcagctcatcgaggaaggcaagatcgacatgatcctcaacacgccgaactcgcgcggctcccgttccgacggctactccatccgtgccgccgccattgccgccgatctgccgcagttcaccaccatcaccgagttccaggccgcactgctcgctatcgaggccgtgaagcataatgattatcagatcatgagcattcaggagcattcgaagcagctgttcgaattggagcgacgggagttctgatgactacactcagcagtgaggaattgcaggcacaacgttcggatttcggtctgcgattaagcaattcaatggccaaatacgggccgctgtgtgtgggcattgacccgcatcgcaagctcctcaccgactggggatacaacgtcgacgccgaaggcgccgaactcttctccatgcgtatgctgcaggccgccaacgggcgcgccgcagcagtcaaattccagacgccgatgttcgagcgctacggagccaaaggtttcgaagcgctcgagcgcgtgctctacgcggcacgacaaatgggcgtcatcaccatcgtcgattgcctgcgcggcggcctgtccaccacgatttccgccatcgcagacgcctatttcaagcccggtgcaccgttgctggccgacgccatcacgctgctgccgtactatggcgcgcgttcgttgaacggcctgattaccgaagcgctggaaaacggacgcggcgtgttcatcgcctccctgacctccaacccggaaggcatgagtctgcagaccgcgttgcgccagagcggcgattacaagggacgtaccgtggcctacggcatcgcctccaccgcgcagaagcataacgtggatatcgaaggcatgggctcggttggtctgattatcggtgccaccatcggccaatggatgcaggattccggcgtggacccctccaagttcaccggtccgattctttcccccggttacggttggcagggtgccgaggccaaggatctgaaaaccgtgttccgcggtacgcgcggcaacgtgctggtcaccgtgtcccgctttatcgcctcgcatgggccggatatcgccgcactgagccaagccaccgagtcgattgcgcttgacgtacgtcaggcgctgatggaagccactgtcgaaggctcggaaaaccagtaatcagaacggaatcagatgtcgcggcatgcgtacgtgtctatctcatcgcgtacgtcgcatcacgattcatattcttccctgttcgtcggggctgtagcagttaccggtcatctcgccggtgagccgttaccacattggattcataatcgctgcacaccacatcatctccggaggaacccatgactgaaaacacccatgctggccgtctaatcgtcctgactggccccaccgcagtaggtaagggcaccgtggaagccaagctgcgcgccgaccaccccgaagtgtgggtgtccgtctccgccaccacacgcgctccgcgcccgggcgaggttgatggcgtcaactattggttccttactgaagacgagttcctggcccgcgaagcggccggtgagttcctggaaaccgccgtggtgcacggcatggcccactacggtacattgctcaagcctgtggaggaacatctggccgccggtgtgcccacgattctggaaatcgacctgcagggtgcccgccgcgtcaagcagcgcgccgccgagctcgacctcgaagtggtgtacgtgttcatcgcgccgccaagcttcgaagagctcgagcgccgcctgatcggccgcggcaccgaaaccgccgaacaacaggcccgtcgcttggagaccgccaaggtggagctcgccgccgaaagcgaattcgacgtcaccatcgtcaacgaaaccgttgatcaggccgctgccgacctctggtccgtcatcgccaaggaatacgggctgtaaactaccgctttaccaccaactgctggtggaggatttcggcgctgtttttggccggcgcctgcttccagcggatcgcttcggattcgtgatgctcggtgacataatgccgcatccattcgaagcactgctgggtttggatggcatcgcttaatgcgcggtgctcctcattgtccgcgatgccgaagcgtacgatcaggtcggccagacggtgatgccgctgcgcggggaacagggcgcggctgatctgcatcgtgtcataatccgcgcaggcaaagccgcagccggcgatatgccgggtgttgtaatccaggaatcgcagatcgaagctgacgttatggccgacaatcggctcgacggcgggaccggcagccggggtagcgagccatgcgatgaatcggggaagcacctcgtcaatcggatcgaggtcggccaccatcgcatcggtgatgccggtcagcgtggtgatctgacgcggaatcggccgcaagggattcaccagctgctggaattgatcgacgatatgcccctcccgcacgcgcacggcaccgatttccgtgatggcgcaactgttcgggtaaaagccggtggtctccaaatccagcgccacataatcggtggggaagacggcatcgtccatggcgattcgcccgccggcaccatgattgggctgggatggttggccgaaaacggtaatgccggaagtggtcacggaggctcctcatatcagtcggtgttcggtgacttattgtaccggcatcccggtctgacggtaaaattattccctcccggtttttctcggatatattggttaggcggccggcaattgcgcggcgcatcgggaagggagcacagctgatgaaacagatagtggcaggcatcgtggcgcatgtggacgcgggcaagaccacgctgtccgaggcgctgctctaccgtaccggtgagatccgcaaattggggcgagtagatcacggcgatgcgtttctggacaccaattccttggagaaggcgcgaggcatcacgatcttcgcgcaccaagcgttggttgaacacggcgacctgcgactgaccctgctggatacgccggggcacgtggacttcgcagccgaaaccgaacgggtgctgcgtgtgcttgattacgcgattcttgtggtctccggcacggatggcgtgcaaggccataccgagacactgtggcgtctgctggccagatacggtgtgccgacgttcatcttcgtcaacaagtgcgacgccgccggattcgaccgcgaggccattctggcacagttgcgcaaacgcctgagcgatgcgatatatccgctgccggcaatggagcagtccactgagggcagcgcggtaccgttggacgcgcttgccgaggatatcgccaccctggacgaggaggcgatgaacgactatctggaacatggcgcgctgtccgtggacagattgcgatcgatgatcgccgtgcgcgagctgttccccgtatatttcggctcggcattgaaactcgaaggagtcgaggaattcctggacgggctggagacgttcacccgcgaacgtgaatggccggccgccttcgccgcacgcgtgttcaaaatcgcccacgacggccagcacaaccgtatgacgtggctgcgcgtcaccggcggtgcgctcaaagccaaggagatcgtctcttcatcctcgtgcgccgcggcgtcgacagcaccgtcgccggtacagggggatgatggcacggtatggtccgagaaagtcgatcaggtgcgcgtctacaatggcgccaaattcgagacggtcaccgagatacctgccggatcggtgtgtgcggtgaccggactgacgcggaccttccccggcgaagggctgggagcggaaccggacgccgaatcaccgtcgctgcaacccgtgttgacctacacggtgttgcccgccggagcggaatccgatacggccggcacctcgggagcggccaaacgcggtggcgccggccataacagcgtgaatcaggacgatgccgagcatgatgccgccaagtcgggaaccggccgcaatgaggagaacgacaccgctcgccagaccgcggcggacaatagctcgccggcccgtccccagttcgatgatctgaccttgcataaggtcatcaccgcattgcgtgagctggaagacgaagacccgttgttgcatgtggtgtgggtggaacggctggccgagattcatgtgcaattgatgggcgcagtccagctggagatcatccagcagaccctgcacgaccggttcggtctggatgtgtcgtttggccccggctccatcctgtaccgtgagaccatcactgcgccaatcgaaggcgcaggtcatttcgagccgctccgtcattatgccgaagcacatatcctgctggaaccaggggagccgggcagcggagtcactgtggcctcggccctgtccgaaaacgatttggaccgcaattggcaacggctgattctgacccatctgaccgagcgtgagcatctcggtgtgctcgttggcgcgccgctcaccgatatcaagatgactttggtggctggccgcgcgcatctgaagcataccgaaggcggcgacttccgccaagccacctatcgtgcgattcgtcaggggcttatggaagccagagctggagtcagtggccggcccgagacgccggtcgagagccgtccggacaccgcaggggagggcaactgccgactgctggaaccgtggtatcggttccggctcgaagtgccagcagacatgatcggccgtgccatgagcgacatccagcgcatggccggcaccttcgaatccccggtcaccgatggcgaatacgccgtgatcgaaggcgaggcgccggtgtccgagatgcgcgactatgcgatggatgtgaaccagtacacgcacggccatggccgtttctccgccactttcggcggctacaagccatgccatgacgccgaacaggtcatcgcagccgccgcttacgatcccgaagcagatctggacaacacccccgactcggtcttctgcgcccacggtgccggctaccccgtcaaatggtataaagtccccgaattcgcccacgtcgactacgccatgtgaggtggtgactaccaaatctgcggccgaatgaatccgttggtctccaagaaccgttgaatatcgcgcatttccggcatattaatggaatgggccatgcccggatacacttgttcggtcaacgtgccgtgctcgtgccagaactcacccatcgccgtcacatcggctttcgggaagatgtcgtctgcagcaccatgcccatagaacaccggcggcttcaacgaagccaattcggcatcgcccgcaacggaccccggtgccagccatccagagcaggagacggctgcggcatatcgcttcggattgaaacgcagcagatgcgcggccaagaggccgccctgcgagaatcccatggcaaccaccggccgagtggcgggaatatgctccgcaacccatgcatcaatggcttgggcggcttcagtcgcctgcttgtctaatgattcgccctccggcacaccttcatgcgcccacgcaccgaaccatgtatatcccatgccataggcgatgggtgcctgcaaactggcataatcagccgaaccggcaccgcaatagttcagcagatcgggcaaatcgtattcattggaaccccagccgtgcaacagcacgaacaccggagcggtttcgggaccggtcaaacgggtcagagctttggtgatcttcatagcctcagtgtatccaccgtttgggcgacaataatgccctgatgttcgcccatcgagtaacgtcccataagtaatgcgtatagcgcagcggccgtgccacgtgttctgatactctacgatgacacggcaggggggacaggtatgttcggcccccgaaatcgtacatgggtggctaagaccgtttatgcgcaggagaagaaacgagaagcaaaggaaggagcgcgcccaatgacattcgattggtcgttcgtgcagcgttacgcgcctttcttcgtcaacggcacattgatgaccttattcatatccgtgtttggcatattgcttgccatcgcggtgggtctggtctgcgctggcgtggaaatcgcgcgtatcccggtcgcccggcaaatcgtgagaatctacatcgaactcagccgcaatacgccattgctggtacagctgtactttctgtacttcggcctgcccaaactcggcgtagtatggtccgccgaaacctgcgcgatagtcggccttggattcttgggcggttcctacatggccgaggcaatgcgcggcggattggaagcggtgcccaacgtgcagcgcgaaaccgcgtacgtgctgggactgacttccacgcaaaccatcacccgagtcattctgccgcaagcagtgtccaccgccattcccggcgtagtggccaatgtgatcttcctgtttaaggaatcgagcgtcgtctccgccattgcgctcgccgacgtgatgtacatggccaaggatctgatcggcatgtattacagcacctatgagtcgttgttcatgctggtcgtggcctatctggtgattctgctgccgatttccatcttcggcacatggttggagcggaggttcgattatgagcggcgctgaaatactgctccagccgggcgtattcccacgtctgttgcaaggcctgtgggtcaccgtgtggatagccggcgtatccgtaggcgcgtccatcccggtcggcctgttggtgggctggttgatgacgctgaagaatcccgtgatccgggccgcgatgcgcatctacctcgacttcatccgcattatgcctcagctggcgttgctgttccttgcctactacggttttgctcgatggttcgattggaatctcgatgccaccggtgcctgcgtgctggtgttcatcctgtggggaggcgccgagctgggcgatctggtgcgtggcgcattgcagtcgattcccaaagtgcagtacgaatcgagctacgtactggggttgagcccgtggcagaccttctcccgggtgattctgccgcaggctgttcgccgtatgctgccggcatccgtaaacttggcgacacgtatcgtcaaaacgacatcattggccgtgctgctcggtgtggtcgaggtcatcaaggtcggccagcagattatcgacgcgaaccgattccagttcccgactggaaccttgtggatttatggcgtgattttctttatgtacttcatcgtgtgctggccgctgtccattgtggcccgccgactggaaaagaggtggtcgaatgactgaacccgaaatgacctgcaagggtttcgaggtgaatcatctggtcaaacagtatgcgaatgccgacaagccggtgctggatgacatctccttcaaggtggagcatggttcggtgctcgtggtgctgggtccttccggctcgggcaagtcgacgctgctgcgcaccatcgccggtctggaaccgattcagggcggcacgatttccatcaacgatcaggtgatcgatgccggcaagcctggcacggaacgagccggacgatccgaccggtccagtgaactgcgcacgcgtatcggcatggtgttccaaagctacgatttgttcccgaacaaaacggtgctcggcaacatcaccatggcgccggtgctcgtgcagaaacgcgataagtccgaggtggaggctgaagcgatccggttgcttggccgcgtgggacttgccgatcgcaaggactcttggccgcacgaattgtccggcggtcagcgccagcgtgtggccatttgtcgtgcgctgattctgcacccggaagtactgctgctcgatgagattacggcggctctcgaccccgaaatggtgcgtgaagtgctcgacgtggtgctcgaactggccaagtccgggcagacgatgcttatcgtcacccacgaaatgcagttcgcgcgagccatcgccgaccacatcatcctgctggacggcgggcgcatcgtcgaggaatcgtatgatgcgcaggcgttcttcgaacacccgcaaaccgaacgtgcgcagcagttcctgcacaccttcgaattcgagtgattcgattgtgccatatcgacgtatttgagaagaaatatcaataacaacaagagaaggagaacccaatgagtatcaaggttgggaaatcattcaaagcactgattgccgcaggcgcggcattggtaatggcggcgtccatggccgcatgcggtccgtcggcaggcaccccgagcgaagcgaagtcctctgacacgggcaccagctccagcgccaatgccaaggcccgcagcctcgacgagatcaagaagagcggcaagatcaagattgccgtcttctccgacaaggcgccattcggctacgtggacaaggacggcaagtaccagggctatgacgtctacttcgccgaacagctggccaaggatctgggtgtggagccggaatacacgtcggttgacccggctgcccgtgtggacgtgctcacctccaacaaggtcgatctggtgctcgccaatttcaccgtcaccgatgagcgcaaggagaaggtcgacttcgccaagccgtacatgaaggtggcgcttggtgtggtctccccggagagcgcccagatcaccgatgtcagtcagctcgacggcaagaccctgatcatcgctaagggcaccaccgccgaaacctggttcgagaagaacgcgccgaacgtcaagctgcagaagtacgaccagtacgccgatgcctacaacgcgctgctggacggccgtggtgacgccttctccaccgacaacaccgaggtgctcgcctgggccaagtccaacaagggcttcaaggttggcatcacccaccttggtgacgacgacaccatcgcgcccgccgtgcagaagggcaacaccgaactgctgaacttcgtgaacgacgagatcgtcaagctcggcaaagacaacttcttccacaaggattaccaggagactctggagccggtctacggcaacgaagtcaaccccgatgacatcgtggtagaaggcggagccgtctgacggacagtccggtggactgtccgtaggcgacgccgagccgcggcagcggcgaggtgtgttgggccggtcgtcaggccgtccattcttgcaggacggagaggtctgattatacccgtccataaccaacacatatagcaacgccggccttcgggccggcgttttgcgttaaggtcgtaatcgtgccgcgcggggaacggcttcgcgcagatgacgcaacactttaagggggtgcgcaatgaccaggttcaacactcagctcgtccacggactgccggttggagacaacaacaccggagccgtgaacccgccgatctacaactcaacgacatatgccttcgagaaggttgacgcgatgccccgttacgactatgcgcgcagcggcaatcccacacgtgacttcctggaacagcagatcgcccagctcgagcagggaacgcgtggttttgcgttcgcctccggtctcgcggcgattcacgcggtgctgagcattttcaagcccggcgaccgcatcgtggtcggtgacaatatttatggcggatcgtattcccagctcaatgagttcttcactcgctggggaatcatcgttgaggccgtcgacactcaggacatcgcagcattggaggccgccgtcaagggcggccgcgcgaacggcatcgtgcctgcccaagccgtctactttgaaaccctgaccaatcctctactcaaggtgaacgacgtgcgcgccatctccacggtggcccaccgtttcggggcgctttcgattgtggataacacgttcgtgaccccgtatctgcagaagccgcttgctttgggtgccgatgtggtgattcactccgccaccaagtatctggccggtcattctgatgtgaacgccggtctggtggtcgtttccggtgaggatctggcgagccgcgtgtacttcgcgcagaaccgtttgggtggtgtgttggctcctgctgagtgcgacgcggtgcgccgcggcattcagacgctggcccttcgcatggatcgtcagcaggagaatgccaatgccatcgcccgctacctgctggtgcatccgctggttaaggcggtgcattacccgggtctgcccggcgcaggcgaccagcgtctggctgccaaaggtctcaagggggccggtggcgtgttgagcttcgaggtcgtgcctggcgttgatccggctgacgtgctcaacaacctgcacctgttccgtcttgctgtgtcgttgggtgcggtggagtctcttgccgagctgccgtgtcgtatgacgcatttcgaactgcctcgcgaggagcgtctgaagatcggcatcaccgatgaattggtgcgtctcgccgttggcatcgaggacgccaacgatctgatcgaagatctcggccaggcgttcgatatcgcttacgcccgttacatcgatcggcatgccgacttcgacgtgttccaacagctgacttcgggggggtgtttgcctgatctaattcttttctgcctatttttctactcctggggagcggcgtcggttgtgccacaccggagccgcttttttatgctctggttccgcctccgctggcagagggctgtcggcgtagccgactggggtggttaagcggaccgcccgcattatgccaaccgcgatatcacagcatccccgttacgatgaatacggtttgatagtgcaccgcgtaaaagtcaagcgcggcggaacaaagaaaggacccgatatgaccatcgacgtctacggtgccacatggtgtggcgactgccgccaggcaaagaacactctcgacaaactgggcgcggcatacacttggcacaacatcgaggaagaggaaggtgccgccgaccgtgccgtggcgatcagcggccagatgcacattccggtggtgcggtacgatgacggctcgttccaagtggaaccctctgcagtggatatcaagaacaagctgcaggagctggggctgctggctgactaggaatccgtggtctgagctgcataaggcgtgcgtcatcgatcggtcttgatggcgcacgccttatctgtttatgtggatcagagagtaggggggcttacgcttcggtgcccactactgttccaattgccgggctttgaccccaatgcgatttcggtagtcggcaagcatattggcaagcgtaacttccctcatggaatccgacatggctttggccactggagcatacgcatctttgagaacgtcgtggatattccgagccacggggcatgtgtgattccctctctcgtggatgccgatcacatcatcgaggttcgtggattccactgcctgatggatatcgagcagagtgatttccttgggggtgtgggcaagttcggcgccgccggttccgcgtgccacggtgatgagccccgcgcgtttgagcgctcccaaggcgttacgaatgctgacggcgttcgtcccggtgctttcggagagcagcgcgctgggcgccgatcgttatttcgactatcgcatcgagaactatgctgaagctctttctgacgcaccggttgaccatgtcatcgacaccttaggcgaaacggaatttgcgcgggagctttcagtgctcaagcctggaggccgtttgctgagtctacgcggtgctcccaatgcggagtttgctcgtcgttttggtatgccgctattcaaacgcgcgctgttcgcgctcgccggtgccaagcttgaccgcatgacacgtaaacagggtaaggaatatcgcttcatgttcgtgcgtgccgatggtagccagttgcgccgcgtgagcaagatcgttgagcggcggaaactgcgccctgtgattgactcccggtgttttgcattggatgatgtgctgatgcgcttgagctggtagcggccggtcatccggagggcaaagttgttatccggatggagcgaccgagcgtctttgcgctgattgctgatttgatatgcgttatcgccagatatgaaaagagaaccatgactcccttttgatgagattgtctgaaggccaacgattggtccggatgcaatatgtgtccaaggaagtttctgaagcgttggtgtcgcaaattactaaagggttcggcatcgatgtcaacataatctttggagatatcgacatcgtcgcggatactccggtagagggcatcgtggccattttcgatgatgaaccggtacggattgacgcggctttgaattatttgaggcagcgtaatattgcggccgaggtgctgaaagagggctaggcagcttggtgtgttccggcattcggcggatattctatagccattgcttataagcgcgcattgacaattgcgataccgatgtgccggtgtcgcgtaccatgacttgctaagttcgggaatagagtcgagcccgccacaatagagcggcatgaggaagaaggattaatgggcgttgatttccgaacgcaagccatccacgccggctacgagccgctggataacggccgtgccgctgtgccgccaatctatgcctcggccgcattcgacctgggtgacgcggcgcgcggcgatgcgctcgcgggcggtgacatcgacggcttcgagtactcccgtgtggccaatcccactgtcgatgcactggaaaagcggcttgccgcgctggagggcggtatcggcgccgtggctgtcggctcaggcatggccgcagtcagttatgcgttgatgtgtgcaggggagggcggcggccgtatcatcgccccgaccgacctgtacggcgccagcgtggacgcgcttggcgattttctgccgcagttcggcattcactccgacttcgtaaaagacatcaacgatcttgaagaagtcgaatccaaaatcgggcctgatacacgtgcgattttcgcggaaaccgtggccaatccgtccaccgcaatcattgatatcgaaccgctggccgaactcgcccacagtcatggcatcgccttgatcgtggacaataccgtgcccacgccatacctgctcaatcccatcaagttcggcgcggatatcgtcgtgcactccaccaccaagggcatcaccggtcacggcaacgccatcggtggcgcgatcattgacggcggtaacttcgactggccgaacggccgattcccgcaatttactgcacgtcagcaggtcatcagcgatgaccgcactggagaatggcatagttttgccgagaaattcggcaaggcggcgtttatcaaacgcattcgcatcaagtacctgcgtacgttcggtgctgtgcaaagtccattcaatgcctacctttcgctcgttggattggagacgttgccccagcgagtcagtcagcaggtggtttcggctcagcgcatagccgaacatctgaccagtgccccgcatgtgaccaaggtcaactattccggtctcggttacacaccgcaatacgaacttgtaggcaagtatttcccgcgcggtgtggggcaaatcctgagcttccaagtggatggcggcgccgacagtgtccgccgtatcatcgacggtaccaaactgttcagctacgtgcccaacatcggtgatgcccgctctcttatcgtcgaccccgcgcgcatcacgcatcgcgaagtaccggccgaagcgcgtatagccgccggcgtcagcgacaacctgattcgcctatccataggtttggaagatgtcaacgacctgatcgcagaccttgatcaggccatcgccgcagcatactgattggatgccgcacttcttttataagaagccagcatgcacacatagtgaacagttgtacacatatgcgtacgatgtctaccgctttgttttgaacgctgatacgatggaaatcacgagtcgaggccgagggcggtttcgacgtgggtgaagggaaaacatcatggccgtattctttgctggtccgctgattatcatcgtgctactcattgttctgctgagtgccgcactcttcgtcgtgccgcagcagcaggcctacatcatcgaacgattcggcaagttccttaaggtgcagttcgccggcatccacatccgcatcccgttcgtggaccgcatcgccatgaaaaccaacatgcgtgtcaaccagcttaacgtgcagctggaaaccaagacactcgacaacgtgttcgtcaccgtggtggcctccactcagttccgcgtgaacccgaacgatgtggccaccgcctactacgagctgcgtgacccggccggtcagctgcgctcctacatggaggacgcgctgcgttccgctatccccgcactgtctttggacgatgcctttgcccgcaaggacgatgtggcgttcgacgtgcagaagaccgtgggcgccgaaatgagccgtttcggcttcaccgtggtcaagacgctgatcaccgccatcgacccgagcccacaggtcaagaacgcgatggactccatcaatgccgcccagcgtgaaaaggaagccacccgtcagcgtgccgaggcccagcgtatccagatcgagacccaagccgccgccgatgcggagaagactcgcttgcagggtgagggccaggccaattaccgccgcgagatcgccaacggtatcgtcgaccagatcaagagtctgcaggctgtgggcatgaacatcaacgacgtgaacaacgtggtgctgttcaaccagtacctcgacgtgatgcgctcgctgtccgaatcgaacaacaccaagaccgtggtgctgcccgcctccacgcccggcggttatcaggatctctacgagcaggtcaccaaggccatgctcaccgcttccgagacgaagtaatcaccccgtttgcgaatccccatccatcgatagtgaagcccctccaagcgagggacttcactatcgctatgcctgaaggaatgccggaatggcctcggccgccgcgtatcccttgcgatacatcatttccaggccctcgaagttcttcttcagggtgttgagaccatacaggtcttcgggtgcgagaatcagcactttgccttccgcctcgtaatgcttggcgagttcgagttcgtcgttgtaggtcttgtagcgcatgcgcagcttctcggccgcggcggggtgggagcgttcgaggatgcgggccggagccaaatccttctgctgcttgcgcacttcgtcacgcaagcgggacagaatcagaatcacgcgatcgtagccgtcctccagcgccttctgcaccggcaccggatcagcgatgccgccatcgaaatacggcacgccatccaccacatacggctcgcaggccaccggcacggcggacgaagccttgatgatgtcgaaatcatcaaaacgcacgcgcgatttgtcgaagtacttggtcgagccgtcctcggcattgcaggccaccacggtgaacccggtcccattggcctcgaacgccgcgaaatccaacggattctcgccatcgtgattgctcagcgtgccgtagatgtagtcgaggttggcaaagttgtggttcttgaagaagctttccgcactcgcgtactccttgcggaaggcgtacttggtgtagaaggtgtggttgcggccgtgctggcgtgcgatgaatgaggtcatattggccgcgccggcggaaacgccgtagcacatatccacgtcgatgccgtcctccagcatgcggtccataacaccacagccgaaaatcgcgcggaacccgccgccgacatcaatcatcgccgtctttgtcataccaaccccctgttcacttgaatctggtatgagcttacgcgtgctgcacggacaacgatatgggcagtgtgctgtgaatttgtctggttcttccttggcttccctcagagaggggagccaagaacggctcatacgttcagcaatttgcgtgacaactcggcaatccgttcggacggatcggaattggcgagctccacgccgccggtcgcgtcttcgggtgccagtttgcccagggactccaacaccacgcccagatggcgcacggtaccctcattgccgtcgatgacagcagcccgttcgggcagcagctcgcggaagtagtcgcggtagaacacgaaatgcgtgcagcccagcaccaccgagtcgatatgctccatgtcgtactggtcgaagtagccgtgcagcgtgcgcatcaccaggtcatggtcgccgagccgcccggattccacgatctccaccaagtcggggcaaggctccttgaaaatcgtgttgttggaatcgaatcgatccatcagtttggcgaacttccgctcacgcaaggtcaggggagtggccgccacaatcaccctctggggaatatgatgcgggtcggaaggcacgtcaccacggtcgcacgccactttcagggccggctccatgccgatgatcggaatatcgtagtgttcgcgcaaatcgttcaccgcggcggaagtggcggtgttgcatgcgatgaccacggccttgacgccttgacgcacgaaccgttcgacaatatcgaaactcagggccctcacttgttcaggcgtcttgatgccgtacggtgcgttggccgaatcaccaaaatacagcacatgctcggccggcatatccttggcgatttggcgagccacggaaataccgccaagacccgaatcgaatacgccgattggagccgaagagctcatgcctgaatcctccctatagccatgcctgcaaccgtatgttgccgcgaccgatcacaaagccgattgttttgcggtgttgtttcgctccctagagtactctgaaagccatgagtcttccgcaacgagtaaccaagacacacgcaaccggcaatgatttcgtggtatacctcgacaagtccggcaaattcgagcctaccgccgatgaggtccgattcctgtgcgaccgtcacttcggcattggcggtgacggcctgattcgcctgacacggcctgatttcgtgtctgatttaagcgatgatcagctttcggacgtactggccgggggcacgaaatggttcatggactatcgcaatgcggatggatcgttggcggagatgtgcggcaacggtacacgcgccatcaccttgttcgctcagcgtgagggtgtggccgactccaccgagccgttccgcctcggcacccgtgccggcgtcaagattctgacgccacgcggcaatatgaggccgtacggagccaacgtgttccaggtcgaaatgggggagtggaagatcggcgaaaccgacgcctacgaggtcaccatccccggcactgagggctcggcgcgcggtacgttcgtggatatgggcaacccgcatgtggtcgcggtgatcgaggatgccttcgcgtccctgccagtggttgaatcactggatttggtcaccaaaccagtggtggctccggtcatcgaatccgaccagaacgtggaattcgtgcgggtcgacgacatcgaccagaacaccggcgtgggtgaagccacgatgcgcgtcaacgaacgtggctgcggcgaaaccctgtcctgcggcaccggcctgtgcgccacaggcattgtgctgcgggccaagaccggcatcagccactgggacatcaccgtacgtggcggtaccctgcgcgtggacgtcaccgacagcgacgtaaagctgaccggagcagccacgctggtcgccgatatcgatttgttgtaaaggaatcaggcagcgaacagggccgcgccttcggtgacgatgatgagtaccacgatcgccacgatccacagtatatcgaccatgaggtcgatgttgaggcggtaatacttattgagtccggccggcaccgccgcgacctcagcctcaccgtcgctatcatcagccgccacagccttacgtgacggcaatccctgcacggccacggtcgcatggctcaacgccatgaactggatggtggtggagaacatcagggtcaggcaccacgggcacagcgtgtgaatcacgaacagcgactgcgtgctcagccagtacgagtaagccaaagcggccagtccgcccagccacgtgcaggtcgcgaaccaacgcggcaccttcacacgcgccagaccgatcaccgcgatggtaacgaacaccgattcggcggcgatgccgaagaacgcgttcggatagctcagcccgccgaatttcacgatttccgcctgccaggactgggccaccgccgaacaggacaccgccgagttcagatcgcagccgagcgcggactccggatgccgagccaattgcaaagtctcagcggacagaatgagcgaggcccccaacgccactgccgaggcaatcagcatgatgagatatgtccaagtggcactgtggcgccatccaatcaacggtcgtgcctccgccaagccaagcggcgtggtgttcgtggtgctggatgatgtgtcggttgcggtgttacgagtcatcatgtccctttcgatagcgctgcgctccagattagcctctgcggttgtcagctgggtgccgaatgtctggtttcggccgttggcagaaggtgacgacctgtctgcgccttgcgtgggaatgctgaaatgaggttacgatggaaggtatgactggatatgtgatgcctttggaaccgcccgccgtcgggtgggacatccactgccataccgccttctcggatggcacggaaacgccggccacgttggccgaacaatccaaggcattgggactcaagggcgtggccatttccgatcatgacaccaccgccggctggccggaggccgaagccgcggctcatagggtcggtttgccgttgctccgcggcaccgagatcaccgccacggatgagaacgtctccgtgcacatgctcggctaccagtatgatcccacgaatcagcgcatcacggacttgttcgccaatactcgagccgcacggttgcaacgcacgcagcgcatggtcgaattgttgtctcgtgattatccgattacctggcaatccgtgctcgcccaagtcaaggagggtggcaaaaccaccattggccggcctcacatcgctgatgctttggtgagtgccggcgtatatcggactcgttcggaagcgtttgcggatgcggtcagcgcctcatccaaatactatattcccacgccttcgccgacctctcatgaagtggtggccgccgtcaagggagcgggcggtgtgattctgatcgcccatgccggtgatgtgagccgtaaccgcagactgttgtccgatgaccagatcgaggcattgatcagcgaaggactggacgggctggaggtatggcaccgtggcaattcaccggagcaacgagaacggctgctcaccatctgccgccggcaccagctgctggtcaccggtgggtctgactggcatggcaaaggcaaaccgaacaaactgggggagaacctcaccgacgaggccactgtcgaagagatcgttcatcgcggcgtgcttccgctatatcggtgattcagcaatacaaaagcggccttgagacaatgcccaaggccgcttatgcgcgattcatggtcacagcgtgccgaagccgacggcgtgcttggtttcggagccgatgatcgcgtaaccgagtgccttggcgggcacgatgatgcgacggcccttgtcatcggtcagatcgatcgtcgtgttgtcggccacggcctgcgcgatggcctggctcacattgtcggctgattcgtcggtgctgaagttcaccggtcgtgccacgttctgaatgcccagttcgatatccatataaggctccttgttctgccgtctttgtgacgaacatcatggtaagtggccgtcgccggccgaggttctgtactctattgtgccgcgtgtctgcgtcgtcatgtgcggtgttacgcgctcggcgtggcgcggaacaccgtacacgacattatttggatgatgtggacgattcggccagcggattgccctcgctgtcatacccgtccaacccggcacgggcatcgcgcagagcgcgttcttcccgctccaacagcggaatcaccgtggtttgggcactcgaggctccgtactgaacgagactgtccggagtatcgtcattcaccgcatcgtcggtcggggcggcggattgagacgcaggggaagcgtcggttgacgtcgtgccgctatgcccgttcatactgaggagctccttcagcgtgatcgtcaccgaagaatgggaagcgccatgtgagggctgcggtttggtcgatcccgtaccggttgcgatgccggagacattcgcttgcgggtgattggcggtccggtcagcatcgggttcgacttccggggtaagatccacgtcgccagcggccacgatatcagcggaaccggtgcgatcgggatcgggcgtgtcgtccgagacctcggccgccgcggtaccggtgtcggactgctgcggttgtgcgggtgcctgatgacggtcgtcctgcaacaatgtgccgacggtgattgtggaaggcaaaccgggcttcgttgacgaggcggcggtcgaccctgcggctggggccggtgccggagtgtgcttgatcacgcccaactggtgtgcgagtcgttcgacctgtgccttgaactgcatgatgtgatcgttgtccgcacggttcaacgcctgaatgaattcgcccacctgttccatctgcagccacaggttggccctgagcatgatgagatcgtcaagtcgagagcccatcatgcggccgtatgcggaaagcacggcgttgcgatgggattcgtcgagcttgccgaaaatccaggcaaggtctcgtgccggatcgttgacctgcatatcctgccagttggtcaccgtggtgatggtggaaccggagaacaggaagtcgccgtcggaaaatccgccgtgaaccgtgcaggtggagaacgaccacaatccctcggtgtccatgatgcgcgcccagctgtcggtgatttcttggggaacatggccggcggagcgtaagcggcgaatccaggcggtcagctgcgaacgaatctgaccggtggtaactaccggatatttggcattggccagaaaagtcgaaggcaggcgatgaatggctccgatggcggtgccgacggccgcgcagtcatccaatgtcaacaggtcgagaggccgcgcctggccatcacggtggacggcaatcatcacggtcgtctcgcctgtgggaccgggcttgcgcggggtcagcggtgtggactccgcctgggtctgctgccccacggcctgtgcggtggccgtctggccgggtcgggaaacgtctcccggggcgaacgcgaccacacggtccatatcgaagccgaggccaccaggctcgcgcgtggctgccagtgtctgcgccgctttcacacggcgaatcagacgcgtacgcccttccttggtattagtggcgtatacgtcgtacaacttgcctgaggcatcttggatcacggtctgatcgatgcctttggcctcgtcggttgcgctggcctgcacgttctcgcgtacgccggccacccccagattcggcaggacggctgaggcgagtgccgccaacatataatcgctacgtttcatcacccttccacactaatacatccgtggcgattcgcaccgcagaatgacacgcaaaacgcatgattctggcgatgttttgtcgtgagcccgattcagccataggcatgagtcgtgccgtgagcgcgaatcgtgccacaatggacgcatggaacaggcgcaggggattcttgaggggctcgatgagcggcagcgtaccgccgcgactacgttgcaagggccggtgcgcattatcgccggcgcaggtgccggtaaaacacgcacggtcacgcggcgaatcgcctatgcctgcgccaccggggcatggaagccggagcgggtgcttgccgtcaccttttcggtaaaagcggcggcggaaatgcgcgcacgattgggccagctcggcgtagggggaggtactggacgttccggtttgggtgcgggaactgccggagtcacggccgcgaccttccactcagcggcattgcatcagctcaacagcgtctgggcagacatatgcgaggctccatttccgcatgtgatcgaagatcagcgtgacgtcgtctcccgcgcgatcatccgcgccaccgcacgtaccgatgccgatccgctgaccgttcgcgatgtgctcgccgaaatcaattgggccaaaatctcgttggtggcggtggaagattatgcgcgggcatgtgccatcgcccataggcagccgcccgccggactcgacaccgctcggttcgccgacgtctacagcgcctacgagcaggaaaagacctcgcgtggcgaaatcgattttgacgatattctgctgctcgtatgccatatcatggatgattttcccgaagccgccgcccaaattcgttccaccatcggctggctcaccgtcgacgagtatcaggacgtctcgcccctgcaacacaggctgctgatcctgtggctgggcgggggaggacctgacggcaagagcgcaatgaaccgcaacgtatgcgtcgtgggcgatccggcccagaccatctactcgtttgccggtgcctccagctgggatctgctgcgtttcgccgatgaattcgggccgctcgccgccgatgtcaatctcaacaccgactatcgttcgacgccggaagtcgtgaacctcgccaaccgggtgcttgcggccgcgccgaaccgtgaggattacctgaaactggtttccgcccgtgaatccggcccgcgcgttacccgaaccgcttatgagagcgatatggaagaggcacagggcgtggcggcacgcatagcccggttggttgccaacggggccaagccgtccgattgcgcgatcctcacccgcatcaacgcccaacagccggtattcggtgccgccttgcgcgctgcgagactgaaatatcgcgtccgcaaggattcgggatggcaatcatccgcgctcgccgacgatgccgcgtccaaacgcgcactattggaggcgatgggtttggacgccaccggacttgccgcaaacgacgatcccggggttacgatttccacgatccacgcatccaagggtctggaattcaagcacgtgtttctgatcggctgttcggaagggctcttgccgtatggttcgccggaaacgggggatgcgctggaagaggaacgccggcttatgtatgtgggcatcacccgagctgaggattcgctgcatttgtcgtatgcacggaccaaggatggttatggagcgcagcgcagacgcccatcacgatttttgtgacgggcgtctgtaatgcatactgaatgctcctgaacgtcgttcaggagcgggaattggctgaaggccggttgactatgcctgcgtatcctccgagttgccgttttcaccgtcttcgccatcttcgccgagcagcttggacagttcggcatcccaatcgatatcgccggtcttgccatctgcggcagggtgagaagcggaaccgttggcatcggaagaagaacctgaaggggcgtcggatgacggagacgcgccatctgcgggcttgtcgccaggcagcgaaggcagcagatcgggatgcgaccacttggcgtcacggccttcagggccttcggcggcggtgatcatctcccatagcccggtggcctcgcgcatgcgcttgggacgcagctgcaaaccgagcagactttcgaacgtacgctcggcggggccacccatcgcgcgctcgcggcgcatcatctcacgcaactgttcgatatgaggcagatgggccataccggcgcgccacaccacgcaatccacccagccctcgaccatcgccagcagcgattccagcgaagccagcgcctcgcgctgttcgggagtgtcggggatgccgaccttggtgagattcaccgcgccggaaatcgactccggatccatcgacgtggcgtcacgcagctgttcctccatcgcatccagatcaatggagatgccgcgtgcgtacttgccgatgagcgcctcgaaacgcggcatcagccacggtaccgaggcgtacaggcgggcgtgagccatttcctgcagggccaggaaggaaagcacttcagattcggggattttctcggtggtctcgaatccggagagcgcagcctcgaacgcggcggcgtcggcggcatcggcggaagcatcagagccggagacttgggcggtaccgtcagttgccggagtatcgctgttgccggccgaagtgaagccaatgggattggcagaagcgtcggtggatgtggagaacggattgaccgagtcggttgaagtgccggccgtgtcggcctcggccgcagaagcctcaccgttcagcatcttcgcgtattcggtggcgttctgggcaatcagtccaccagccgggttcttcagcaacgcgatgccctgatcgaagctgccatgcacttcatggctcagattgccggccgcatgccccaactgcatggcaaaggacgtgttgcccagcagcttcatcagctgggctgggtctttcataccgtcgggaatcggaatcggcaccggtccggcgaacatgccggcaatctcgccatcgccgaacgcgccgccaagacgctccgaaatcaccgaagccaaagcgtcgttcatcgactcggccacaggagctgcgaacttcgcccactggtcgatggtgccctccacccagccggcgcgggtcagcacatccggatcgccgggcgcgggattgaactcgcaggcggtatccagccacaggttcgcctcactcatcgcgcggcgagccgcctcgccatccacggcggacacgctggacgcggaaccggaggcgttggcctgctgcaaggcaatcgacttggcgagcttgacgttgatcggcccttcctcgacagtgcgctgcatatcgcccatcgtgttgagtccgccggcgctgaacgcggccatcatctgctggacttcggatggattgggcagtcggctggggtcctgactcatcagctgttcacggatctcctcaggcaactggctgatctgctgccaggccatctcaccctgaatggggccgaagcatttgatcagccactcgtgaatcgcgttgtcgtccatgcgtatccttctttgccgcggtgtgttaccccaagtgtagggtctgcccgggcctgttcgcttgtggccgagcaatattttcggtttatgttcgttttcggccgatttcggccctccgcttacactgtagggtatgtttgcacgccacaggaatcaggaaccagacctcgtccaggagcaggagagcccgactgcggattcggaagcgggagatgagcacatgccatcgttcgaagtgaagcatgattcgcgcctatctcgtggaatcagccgtgctcgggcctatgcggccgctcgtccgaaacgccatttcgtcggtgcattcgccgtgttgcttggtgtggtgattctgctgctgcccagcccgtacgtcatcgagatgcccggacccacccaggatgtgctgggcaaagttgaggatggtgcggttatcgacatcactggtaccggcgtgacgacgtataaggattccggcaagctgctgctgaccacggtgaacgcgtccggcgtgcccgggtacccgatcatcaacgcgcaggccgtctggggttggtccaatccgcaggtggaggtcatgccgcgtgaggccacggtaccggtgggccagagcgcggaccagtatcagaagaaagtcgaacaagacatggccggttcccaggattcggccagtgccgtcggtctggcgtatgccaaagcccatgcggacgaactgggcattgacgccagtgcattgcaacacgccaaggtgacgatgcacgtggacagcatcggcgggccgtccgcaggcatgatgtacacgctcggtctcatcgacaaactcacccccgccaacgagagcggcggcaagaccatcgccggcaccggcaccatagacaaggacggcaaagtcggcagaatcggcggcatagagctgaagatgcttggctccaagcgcgatggcgccacatggttcctggcccccgcgtcgaattgttcggatgtggccggccgcgtgccggatggtctgcgcgacgtcaaggtcgccacgctggacgaggcgtatcaggcgttggtggccatcggcaaggggcaggccgacgatttgcctcattgcgaggcctgacatgcgcggccagtcgttgtttctgatgagacgactcgcatgggtctgcccacaatgcggcgattttcggccgcgttaacgcatttgttcgcgaagacttgctaatgtgtcccctgtgaatcaaacggcatcacagaacgctgaagaatttggtttcgagcccggcgatatcgtccaggagtggctctgggacgacgacgtggacgattccattcgtgcccagattgaagagctcacgggcgaggatctcgtggacgaggactacgactccgctgtggacggcgtcatcgtatggtggcgtgacggcgatgatgaggacgaattgtccgatacgatcgttgacgcctacgcggtactgggcaatgacggcccgctgtggatactgactcccaagcccggccgcccgggtgccaccagctcatccaccgtgcagtccgccgcacagaccgccggtatgaacgccgccaccccgctgaccgtcagctcggactggaacggcatccgcctgcgcgcattcggcaagggtcgctgataagcctcaatcaatacgcttgactttaagcgtgttgactggcgttgtgtgctgcgtagtgctgctgggcgtgactgaatgtcatcgcgattgagcgctacggcacgcgtatgcgacaccacgtgtcgcgcagtgctggccatacgctattgttgtcatttgcgggcaattagctcagttggttagagcgccacctttacacggtggatgtcgggggttcgagtccctcattgcccactttcatttttcatcgcttcatgcaatcccctcattccacggatataggctgtgacgatattccctgacagtcttcggcaagggttctgaaatctcaatgagatgcgtgcagaaggaaaccggcagtactgctacaaaatcgtgaatttcggtcttcttggtcagatgcgtctcaatagtcacgtaaagttgtggcagagtgtttatatccagcaggaggtcgaatagccgatggcgcaggaacttcgtgaaggggacggcaagtcgggcatcgcacgtgcgggcaagcgcaagtgggggtatgaccccgctcaggtggacgctttcctggagcgcgcccatgctttgtatgacagcgagggcatgaatctcacccagcatgacattcagaacgtgtcctttgatttgcgcaagaacggctatgtgatcgcacaggttgacgccgcgcttggacgtctggaacgtgccgtggtcgataagcagaccacatgggagatcgcacagcatgggcgtgtgacgtggaaggcgaagaccgagaagctgtatcacgaagtccagaaccatgcggagcgtaacgagcgcgaacgcttcaagtccggagcgcccaagcagccttcgtacgataagaagcaggtggatcgtctggtcgaccagattgtggacaaggcggcggccgcattgggcgttgacggcgtgaccgaagacgatgtacggtctttggccgatctcaatgcgaatacggtcaacaatgtgatcttcacccagcgcaagggcaagaaaggctatgacgagcgacaggtcgattacttcctgaacgcctgcgtgcagttgctgagtcgcttggaatcctatgcacgtgtggccgatttcgtgtccggcgagcccacggctcctgcccagaccgccacgaacgtgaccgttcaagcgaacggcgtctcgccattgttcgcttccggaacgcagcgcccggcaactgacgaacgttttgcgtcgtctgccgttgctcatgacgaatcattcgatgccctgcatcaggccgagcagagcttgttcactgctccggctccggttgctcccgcggcaccggccgcggcggcaccgatcgcctatgcgccggctcctgcatcgttcgatgcttccacaagcaccaatagcaccaatgcggaacagccggtttcctttgctcccgcagcatacccggtgcatacgtccaacgagtctgcggcgaagcccgtctccgagacgccttccgtggctcctaccgcagctgttgcggctgagcctcccgccagtgccccgtccgcgccggtttccggtgcggacgctggcagcgccccctcgtttgctccggcacagtcgtcacacgaatccgcagctccgtcatcgaccccgtcggtgttcgcggaacagcccgtggatatggtgcaggacggttcctctctggccgctctcgcccacatggctgcggtttctcaggaacttccggcggtggatgcgccgtccttcgctcccaagatgcccagccttgatacaccgaatgcgctgaaattgaatgaggtaccgggttcggtttcatccccggcaccttccgccccggcagcgcagcctgtgaatagcactgctgacgaggctgcgtccgctgccatgccggtctcctttgctcccaccagcaagccggatcgtaacacgaactccattccggttcgcgtatccgatagtcagcctgcagacagcacgacctcccgtccggctgcggaatcatctgaacacgttgccgcctcccacgacacggaagcagctcagccgtcacaggataagcacgattccaacgattcgttcccgctgctgttcccgcttgtcggtaacttcgattcggatatccccgacctgtcgttccccacactgaacaatgacgatacgaagaaggaacagtgagcatagcctccaactccaccgtcatcattctcggatccaccggatccatcggcacccaaggacttgacgtcatctcgcgtcaccctgaacgatttaccgtcaccggtctggcggcgggcggagcacatatcgagctgctggcgcaacaggccgcacagttccatgtgcccgaagtcgcggtgtttgatgagaccaaggttccagcactgcaagcggctctcgcacaggccggcgcacaaggtgtccgcgtgaccggcggtccggattcggtcatcgccatggccggatccggtgcgaatgtcgtattgaacggcatcaccggctcgatcggcctcgaaccatcgatcgcggcgctcaaggccggttcccagctggcattggccaacaaggagtccgtagtcgcgggcggtcatctgctgttcagcgcgcaagtgcgcgagaaccagatcaacccggtcgattccgagcattccgccatctggcaatccctgcgctccggaacccacgccgaagtcgccaagcttgtggtcaccgcctccggcggcccattccgcggctggaaacgtgccgacatggagaacatcactcccgagcaggcgctgcatcatccgacgtggaacatggggccggttgtcaccatcaactcctccacactgatgaacaagggcctcgaagtcatcgaggcgtcccgcttgttcaacgtgccgcctgaacgcatcgacgtgaccgtgcacccgcagtccatcgtccattccatggtcgaatttgtggacggcgccacgatttgccaggcttcgccgccagacatgcgtctgcctatcgcgctgggcctgtccgcgccggaccgcatgaccaatgtggccgccgcgtgcgactggacgcaagccgcaacttggacctttgagccgttggacgatgaggcgttccccgccgtgcaactggcccgccactgcctggccgcctccgagaagcatacggctgtgctgaatgcggccaatgaacaggccgtgcatgcgtttcttgatcatcggctgccgtacctcggcatcgtggacacggtcaaagccgtgctggaccagatggacgccgagcttcgtggtaacccgctgttcacggacgtggaggaaatgaaccagcttgagcttgaagcccgccgacgcgccgacaacctgataaacaagcaatgatgaataccttgaatacggaaaatcccatcgaaaagccgttccgcaaaaccggtgatccggtcgacctgaccagcgaatcgcccttgcacccgcgccgcaagtcccgccgcatcatggtgggcccggtgccggtgggcgggggagcgcccatctccgtgcagtcgatgaccaacacgctcacggccaacgtacctgccacgttgcagcagatcgccgaactgaccgccgccggctgcgacatcgtgcgcgtggccgtgccgagtcaggacgatgccgacgcactgccggaaatctgccgcaaatcgccgattccggtcatcgccgatatccacttccagtccaaatacgtgttccaagccatcgacgccggctgcgcggccgtgcgtgtgaaccccggcaacatccgtaagttcgacgaagtcggcccggacatctgcaaggccgccaccgacgcgggcatctcgctgcgtatcggcgtgaacgccggctcgctggacaaggaactctacgccaaatacggtggcccgactccggaagcgctggtggcctccgccttgaaggaagcgcacatgttcgaggacgtcggcttccacgatttcaagatctccgtcaaacaccatgacgtcatcaccatggtcgaaacgtaccgactgctcgcatccaagggcgattggccgttgcacctcggcgttaccgaggccggccccgcctggcaaggcaccatcaaatcctgcctggcgttcggtgcgctcttggccgagggcattggcgacacgattcgcgtgtccctttccgcgccgccggtcgaagaggtcaaggtggggtgcaaactcctggaatacatgggattgcgcccccgcaagttcgacatcatctcctgcccgagctgcggccgcgcccaagtggatgtgatccagctcgcctccgccgtcaccgaaggcctgaaggacgtgaccgcgccgatccgagtggccgtcatgggttgcatcgtcaacggtccgggcgaggcacgcgaagccgacctcggcgtggcctccggcaatggcaagggccagatcttcatcaagggcaaggtcatcaagaccgtgcccgaagaccagatcgtcgacacgctgctcaccatagcgaacgatatcgccgcccaaatggaggccgacggtcaagtccccgtcaattccaccggcccggtcgtggtcccaatccagcaccccggtcactgattcggccgaataggccctcggcataaatatcgcggtcagattacaatagcgcacgtgccgcaagaagaagagcatcgcctgactgttcgatccaagccgtggaccagcacccaccggctgatggtcagcctgcccatcttcattatcctgattggcgtgctggtctccatttccaatctgaccacggtgccttggaacatcgaacccaccggccagtcgatggccacgctcaccgacgataccgaagtcaccttcgataacccgtccggagaaacgctgccggcaaaaggcacgtatgaggtcaccgagcgatacatcacgctgaacatgaccggcgacggcaatctgaccaaggagtccggtgctcggggcaaggccaatgcggacggcgtccaagccatcaaggtattgattcgggaacctcagaacgcatcaggcaagcgccccggcgtggtgttcatgcacggtgccggatacggcacctgtgacaactcctttggcgacgtggcctccggtatggcttcggccggctttgtgaccgcagtgctcgacaaacccgtctggaacaccaccgacatcaaccgcgattatccggcctcagccaaggcttatgatcaggtcatcgaatacctgcgagaccaaagcgatgtagacgaggccaaggtcggcatctatgccacctccgaatcgacatggatctcctcgtatctgctcgaggacgatccggacatcgccttccagattctcctgagcccgatggtgttcagcccacgccaatcgctgggatttttcgtcacccaagacttcacccttgttggcgcgaacgaaggctatcaatccatcgtccaacgtgtgttcagcgcggacaccggcctgttcggactgaacaatttcgacctcgccacactcaaacccgccgcctacgccgtacccacctatgtggcttacggttcgaaagacgtgatgacggcgcaggtcgacggtgtgcgtgcgattctctacaacgcccacaaagccgataactggaatgtgaccgtgcgcagctacccggtcgccaaccatgtgctgcgtttgggagatgagtccgaagcgggcaccccgtttgcggacgcctatgtggacgatctcatcgactgggccgtcggcacttccgccggactcacgcagaccagtgaaaaggtggccggcaccaatctgtaccaatcaatcggtctgccgggcgctttgaaggcaagacgcgtcggcaccatatatggtgtgattctgcacgtcacggtggtactgctgctgctcgcatccatcgtgctggcactggtggcgctgggtcgcaaaatcgcggcggatgcccgatggcggcgagagaagtgcgaggccaaacatgcgggcatgctgataccggaacggcctgtggtactcggtttcgcacatggtttcggcaatgcgctgctgactttgaccctcaccactcttgccacattgctcatcttcttcgccggactcgggcaggtgatcatgggcgtggtcaaacttgcatggggtagcgcacctaccgagacgccgggtgtcatgtattggagctggccggtcatccaagtggtgtccgtgctggtgctatgggcttggtcccgcgtctttatgcacctgatagaagccgcttccgtccgcggcctgattcagataccccctcgtcgcgaatccgttcgagacatcgtcaccggtgctgacccggtactcgcctccacccgtctgggccgaatcctgttctggctggtggccttcaccatgctgtacatactgttggtgttcgctttctggggtctgtttatttactgactacttcattgagtagagtctgccgggcgtcgcggggaaaggagatgagatgtcgctgtaccgagacgaaggtgtggtgttgcgcacctccaaactgggcgaggctgatcgtatcatcaccatcctgacgcgtgggcatggcaagattcgggcggtcgccaaaggcgtacgtcgcaccaaatcacgcttcggtgccaggctcgagccgttcatgcgcgtcgatgtgcttatcgctgaaggccgctcgcttgacgtggtatcccaagctgaagcggtcgccgcttatggtgctccgatcgcggcggattatgcggcgtatgaggccgccaacgtcatcgttgagactatcgataaactcgtcagcaccgaacatgagcagctgccgaaccaatatcggctgctcattggcgcgttgaacgcgctcgccaaacaatcccacgccccgcaagccataggagactcctacgtgatgcgcgccttggccttggccggttggacgccgcgattgggcacttgcgtggtatgcggcaaggcggagccggcgtacctgtccatcgcgtccggcggcgtgatgtgcgaagccgaccacactaccgatgcgcgccgtatcgcaccgttcgtgttaaaccagttcgatgcactgattcgtggcgattggtcggtgcttgatgccgcgcctgtggagcgggttgtgcaggagttggttgaagattggggggagtattacctcgaacgcccgattcgttcgctgcgcttgatagattcatgagtatggcttttgagaacgttgattacacgtcgttggacattcccgcagctccgttcagcgaccccgctcgtattcccgacttccccaagaacaaggtaccccgccatatcggtgtgattatggacggtaatggtcgttgggccaagcagcgcggcatggtccgcaccaatggtcatcaggccgccgaaccggtggtgttcgacactatcgccggtgccatcgaagccggtgtacggtatttgagcctgtacacgttctccactgaaaactggaagcgctcgccacaggaagtgcgcttcctcatgggtttctcgcgtgaaatcatccaccgtcgtgtggaacagatggacgagtggggtgtgcgcgtgcgctggtccggccgtcgccccaagctgtggaagtcggtgatcgacgagcttgaagccgccgagaagcgcaccaagaacaacaaggtcatcgatgtggtgttctgcatcaactatggtggccgtgctgaaatcgccgacgcctgcgccgccatcgctcgcgaagtgcgcgatggcaagatttccggcgaccgtgtgactgagaagatgattgccgaccatctgtacaatccggacattcccgattgcgacttggtgatccgtacttccggcgaacagcgcacctccaacttcctgccgtgggaggccgcctacgccgagctcgacttcgtgcccgaactcttcccggactgcggccgtgacgtgctatggcgctccatcgaccattacatccaccgcgatcgccgatttggcggcgtgaaataaagaacagtccagtggactgttcgttcacgccgcctggccgaggccgataggacatgaccaggtaatgatgagtccggcgaagccggtccttgattgctgggggtgtgaaatagtccttgttaggccccctctgacgggctgagccgtaaagcaaacgcccggtgggctgtttgtaggcgaagacgagacgagagtcgagccagaagaatgcgagcggcagcttgtccgtaattgcggtcgagctgtccgtgtagcggactgaggggagttaccggcacacctcagccatcctctctacaaactcatccaaaaaacgtcccgaatccacaccaagtgccacatgcacatgcggcatggaatgattcaccagcccaaccgggtctccggtggtccggcctcgtactccattgaaatcaccggtattggtctccgcgcgcaacgcaagatcaaaacaatcgaccagtgaagaatcaagtgcaaccgccgccgccaacggatcatgcaacggcatgccgccagagaacagtgcggggtcggcttccaaatttgccttgatggaaaagtccgcgagatcggccaagaaccgcccgcgcttggtccccgtcgcacgccaccggtcggccgccgattgcggtagcaaacactggtgagtcacatcaagtcccaccattgtgatgtctgcgccggaatgaaatacacgattcgcggcctcagggtcttggatgatattcgtctcagctaccgcatcccaacaattaccgggttgggtaagcgtaccgcccatcatcaccagcctgagtttcgatgcaatatccggtgctcgagtaatagccgcatccacatccgtcaacggcccggtagccagcacggtaacgtctcggccaaactcgcgaacctgctcaatcagatactcaatcccatccgcagcatcaacggagcatctccttttgcccccgctggcgagagctgtcggcatagccgactgggggtggcccaccgaccgagagcggttcacacgagaacaagcacccaacgccggatgagcatgaacatcccccgccaaatacccgccaacagaaacaacctcatcgggcacatccacagacatatcatcaccaggcacacaagctccatcagccagagccccggaccctgccagccgagtattccccagtccatcatccccgtggaactgggcacaccctgcatcaggaataaacgcatcagcccaagaaggatgctcagaccctaaaaacactggaatatccgcccgaccaaacaaatcaagcaccgcgcaagtattggcataagccgtgttcgcatccacattgccataactggcaatcacgccacccaactcgcactcatccgtcgaccccaacaaatacgccaacgccaacgcatcatcaacacccgtatctatgctggcaataatgcggtcaggacattggaccatagaatcgtctccttgttagcgtaatccgctatgaataaccttatcggccgatacgcaaaaatgcgtcctttcctcatgggaaggacgcatttttgcgtagattcaaactcggaatatcggaaattacttgccgatgaattcgtcggtggcaaggtccttggcctgcggggcctcatgaattatcttgtcatgactgtcggtgtatgcgtcttcttcagccaggaagtcgaagtattcctgagcgcccttgaagtcgttggtgccgagcacgaaagagccgtccttgatcttggccggatcgccccagtactggccgtcgacgataacctgcatgctcttcttgacgaattcgggcttgaggttggcgtcaggggcttcgtccacgagaatctgcgcggcgtcatccgggttggcgtacgcgtactcgtaacccttttgagtggcctgagtgaacttcttgaccaggtcgggattgttcttgatggtcttgtcattggtgatgatgccgatggtgtcggcgttgccgggcacgccatagtcaggctcggtgaagcagttgagcttcgggccgtacatgtcggcttgcacgccttcccacgtggcgtagaagccgccgaaatcggccttgccggattccatggtctggaaggtggaggtgccgacggtcaccttgtcgaattcgcccttgccgccatcggtttggatcatgcggcgcaccacggcatcggactcgttggagccgaaggtggcgaaggtcttgccatccaaatccttaggggacttgatggcggtgttggacgccagtgcgcaccaaatggcgctcggcttctgctgcacctgcagcacctgcttgatgtgagcgcccttcagcgtgtagacgcccacgttggtcaggttggacagggcgaagtcggccacaccgttgttcacggcctgttcggcaccggcctgggccacggccacgatatccacgtcaaggccggcgtccttgaagtagcccttgttcttggccacgtacacgccgatgtggttggtatcgggtgcccaggaaagcatgaaagtgaccttcttgaggtcggaggtgttggagttggaggagtcggcggtgttggtctggccacatgcggcgaaaccgaaagtcatggcaagggcgcccacgagggcagcggccttggatacaaggcttttcttcataatgatggttccctaattcgttgtctctctatcgttctctgggattgcttcgaacggaagtcggcagaaaacgatatggagggccttgatttccgttcgaccagcgcccccgacattccctatgaaagctcgggaaagccggtttgccacacgctggtaaagctgttccattatagagacagggttggagacctcatgagaagccgcttcgttcagtcggtcctgaccgccggctcgtgcctttgacggtaaaaaaagaactactggtccgcgtcggggtcttcgtcgtcgccgggcgggccgagcaggatgcgctcgctggcgtttaccgccagcatcagtacgcatgtcatcaggataatgacgatggtggcggagaagatcagcggcgtgcggaatgaattgtaggcagcctgcagccagatgccaaggcccttgcgtgcgccaaggtattcagcggtggatgccgtggcgaagatgtatgcggcagatactcggataccgccatagatctgacgtgcggcaacgcgcagcttcacgtgccagagcgtccagaccggggtcgcgccgcaggtcaatgcgacgtcggaatagaactggggcactgcttctagtccgcgcacagtctgcacggcgatggggaagaggccgaataccgccacgattacgattttgccggaaatctcaaaaccgaaccaaatcaggaacaacggggcgatggaaatcagcggcatggtttgtgcggcggcaagcagcggatagaacgccgcgttgaacgtgtgcgagcagtacagtgcaatgccgatcataatgccgaagaacacggcaaacaggaatccaaccacgccctcatagccggtgattgccgcggccgggccgagcgtgttccatgtttcgatggtggcggcgaaaatctcgcttggcgcggagatcatcgtgggggagacatgtcctagatccacccacgtttcccagactgccagcaatacgatgacggcgatgacggtgggcatgcggcgcttgaggcgcttggcgatggacatgggatgtcaccttgctttccgcgccagtccggtttgctggtggcgcttgcggccggggcgtggaacagtaaggtgaggagcctgcgcgcctgccggtcgtgtgatggattgtgttatatgccgtccatcagtataggcgaaggcgaacgacagggcgcacaaaaaacctccctcgtcagagggaggtgaaagagctactccagtccgatggacttcatgtggtggagcttcagggaatccaccttgagactaccggactcggcgacgagcttgatggcgcgcgggccttcggaggcgtaggagtaggagctcagcacttggtggccaccgttgacgtagacctccacggagccgcgatccacgaacacgcgcaggtccagcttgccggaggccagttcggcgtcggtcagtggggcggcgcggtagccgcgatcgccgttggccatggcctgacgatccaccaccacgcggccgatctggccgtcataagccacgtaggtgtaggcaccgtcctcagtggcgtgaatcttcagacccgcacgctcggcagtggaggcagccaagtcgatggtcatttcgatttccacggcctcggcgtcgtcggcgatgatctgctcgccatccatgtcgagtgtgaccgaaccatggtcgagggtatcctcgcgcaggccttccatttcggcgaccggcgcggtgaccacgtcgccgtcatcgccaagggtgatctcgcgcggcagggtgagctggccacaccagccgtcatcctccatgggaatcggctgcacgaacgggctcatccagccatagacgatctgacggccgtccacattgaaggactgcggggcgtagtagttgtggccgcaatcccacaggcggaactcggtttccggcttgaattcgccgcccggctcccacgtgccgatcatgtagccggcgttgctgacgttgcggttcatgaagccgctgggcttggaccccatggcggagaagccaatgacccacttctcgttgccgtccttgtctttgatggggaagaagtcggggcattcgagcatgaacacatccggatccgggtgctggaagagcacgcgctcgtattcccagcggaccatgtccttggaggagaacagccacatctggccgcgcttgtccgcagaggagacaccgaaggtcatgtaccaggtgtcgccggtcttccagaccttcgggtcgcggtagtggtggtcgaccttgtcggtcgggcagtcgatgatcatgccctgcttggtggcggaggtgagctcgtcattgtccggcagcgcggtcatctgcacctgccagtcgccgccggtgttgtcgtggccgttggcccaacggtggccggtgtagtagaagcgaaggtctccgttgtcgtcgatgacggcggaaccggagaacacgccgtccttctcctgctctaaggacggcgcgaacatgatgggctcgcgcttccagttgagcatgtcggtggaggagacgtggccccagtgcatcggaccccactgggtgccgtaggggtgcagctggtagaacacgtgccagcggcccttgtagaagcacaggccgttcgggtcgttgatccagccaccgttggaggcgatgtgatacttcgggtaccagcggttgttgcgcttggcggccatctcagccacgccggcttcggcttttgccagttcagcagcgtggtcgcggatgggggtgagaacaggggtttcgggagtgaagtcagtcatggctgtcctttcaggccttggccgcttccatctgacgcagctgcttgtcggtgtagaacgggtcgccgccgacttcctgatcatcatgcttgatgacgaagaagccgtaaatcagtgcgcacagcacgatggcagagatgacccagaaggtcacgcgggatcccatgtcgttgttcggcagaatctgagccatcttgtcgtggaaggcacccagaggggtcgagaagatgacctgacccacttgggaagcgatctggaagcccaccatgtacagcgtggcagagagcttggtgtcgaagtgcagagtgaagtagcggaatgccggcaggcagaacagcggcacttcgatggagtggaacagcttgacgatggagacggtgatcgggtcgtggaacacgccgcacaagccgatgcgcaggaacatcacggtagcgccgagcagcagagcgttgcgcacgccgatcttcttcatgatgatcgggaccacgcccatcattgcggactcaaggaagacctggaaaccgttcagggtgccgtaggtggcgttgccgatttcttcagtggggaagaggttggcgtagtaggtcgggaacatctgctgatcgaacacggtgtagaaggtgttggtcagcagcatgaagacgatgagcacccacagggtcggcatcttgagaacggcgaccatttccttgagggacgggttggtgggggctgcgttcgggtcggtttccttcttgagctcttccttctgctcggccgggacccagaaggcgtacacgaggagcatgccaaggccgaatgcggagccgacccagaagttgatcagcgggttgatgttgaacaggaagccggcgcacagcgccacgatggcgtaaccgaaggagccccaagcacgggactggccatattcgaaaccgaatttacgggagtagcgttcggtgacggcctcgaacagggagcagccggacatgaagccggcagacagaacgatggagccgatgagtgcgccgatccagcgggtggtgccaccggcgaggatcatcggggcgtaaacgaattggacgaatgggccaacgcaggcggcgattaccgagactacgatgacgagcttgcgcttgatgccgagctgatcctgaatcacgccgtacacaaacatgatgaccagggtggccagcgagttgatggagtagatggtgccgacttcagcattggtcaatccaacgcctgagatgagccagcgctggaagaaggaccaccagatgccccaggagcagaagaacatgaagatgccgaaagagctctgcagataggaaggattcttccatgcagatttggttgcacttgccataatcatcctttgattactacttggttggttattggttatgtaacgcttctgctcgggcggccgtgcctttgtagaagttgttgcgtagtaattattatgcgacgtcaatcgatttacgtcaatcgattgacgtaaatcggcgtgtcgtatccgttcgacacgcaaaaggcctccgtgctgaacggaggccttgagaaatcgtgtgggactcggttacttcaccgaggccttttcgatcagcgtgcagtggatcttcgccggaatcggcgcgtcgatcggcggcaggggagcggtggtcgctggccatgagacgtcgtccatcgagcgtccttcgataatcgacaccagcttggccacggcccagtagcccatctcgaaatgcggcagttccacagtggtgagcatcggttccagcgtttcggcgaacacgcgatggttgtccacgccgaccacggagatgtccttgccgaccgtgagtcctcggcgtgcggcgcattcgtacacataccaggcgcgggcatcgttgaagcagaagaatccgtccggatgctcggcatcgaacaaatcgctgactgcggtcagtgccggcccgttgttgagcacattgacgaccagatgatcgtcatagtcgaggccggcgtccctgagcgccgcctgatagccttccaaacgatcgtcctgcgcaatcagcggctccaagcaacccacataggcgatacgtgcgcatccggccttaaccaatctggtggtggcgtcgtagccgatttggaactcgtccggttccacgctcgggattttgccaagcgagtcggtggcatccaccaacaccagtggcgtcttggccagcgaggaaggcacatgggtgatgcggttcgacatcttggcgtacagaaagccgtcggtgccgtatcgcttgagtgcggcgatttcctcgctctcgctgttctcgccgtcggtgctcacggtgatgagcatatagccgaactggcttgcagcggtctgcgcgcccagaatcataccgccggcgtacggggtggtggccacctcctcactgatgaaaccgaggatgtgcgtcctgcctgtacgcagcgaactggccagcggattcgactggtagccgagcttggtggcgatggcgcgtacattgtccgcaattttggactttacgcgcccctcgtcgcgtccgttgagcaccagcgataccgtagagacggaaacccccgccttgttcgcgatttccttcatcgtaaccatgcgtcaaacgatacaccctaattgacggactgccaggaaagtatcagttttctccaccgactccgccgaggttgcgcaccgcaccgatgaataatggtatgccgtccggggtgacgtacgaatacagaaatgggcgatccaccgtgaactcgacgttgtccaccggcgcgctaacggagtctgcgccgaccttggtgaaggacatggccttggcgccggcttcgttcatctcgatgcgcgtgccttgcagaatcgagccgatatacaggttctcgccgtgcgaaccggtgtcgatcatcttggtgaagtcggcgtcgcctgcactgaacgcatcggtcacccccagtttttcgaatgccttgatggtggcttccgagtcgaacatgctgtcgatggtgaatcgcggtagcgtgacgttcaccatgaccgagttgacggagacgccccatccgggcatactgtccgcggcgcaacccattgcgccctcgccaagggaagccgtcgagcatgtaccgaacgcccaactgagcttctcggcatcgccggccaactcgtcgaaatgcccttcggccggcagcacgatggccagattgccgccgttgtcgaacggaatctccacccgctgccaagtgttgtactcatcatgtccgtaagccatttggctgaaggtccggtgcatcatcggcacctgagcatctccggcttcgccgtggaaggtgccgttgccggtggactgctcttcgaacggatccttccaacggccatccgcatagacggtgttgatgatggacaggacttcacggtcacgcagcgtgatcttcggcttgagcgaaccattcgtatgcttggcgatccaatcggacatctttgcggcggcctgatcgtcgaacggtaacgtggtgacttcggcctcgaacatcttcttgacggtggattggtaatcgctggcaagagagtagtcgtcatcaatccacagcgagttcgcggcgctcatctcggatttcgcccccgaatattgcccgttgatcgaacttagcagcgattggtagtcgctatcggtcagcgaaccggagcccagcagttcgttcagttgcgagcgggtcgtgccattggcgccctgcgcggcgatggccaacgccatccacatcgaagcaggagagtagttcacattgccggtgcctcggtcgccggcttccatcgccaggaattccggtgcggtgcggtaggcgaaggttgcggtgctgttgactaccggctgcgtggcaggcgtggccttcggcttgaacatattgcgaaccaatgcgctgccatcgccggccgtccaccatacgccgccggcgacggcaaggacaagcactactgtcacgatggcggcgatacaagcgttacggcatttgcgttgtccgcgcaaccggtactgttccatcagttgctcgctcatggttggcccctttgcttggatcggctcgtgcatcattgcatgaaatcgctgttttcattatattgcggctttcccttgagcccaggaacggtatggggaccccggccgtaagcgaagattggtccagccgaatgccagtggtccgatgattgcgctcgccaacgggaaagacagactgccggatcgtgtcgaaccgagtatcaagttggtgattcccaacaccaatggccagtgcagaaccataccggggaaccatacgaacaggtttttggcagccctgtcaagaacctcgtcgggcatgagatacattgatgagctccactgcagtagcagcaacaccgctatcagtacaaccatgccaatccaatgcgcgcggttccatgtgaacagtcgttgcatcccgcgctcggcggcggcattgcgcatatcgctcctgttgagcttgctgagtgcttgtgcacggttcattgccgtcctcctttaccgccttgtcaaggattgatgatgattccatcgtaaatcacgcaggaaatgtggaatgatagttgtcatagtgaccatgacgtgtcaggacggagtagttcggcgtcgggcacactgaaggggtgaatgtaatggaagaagcgcgcaaccgcaacatacgcatcggcattgtggacaatgacccatatgcgctgaaagtgttcggcgcgctaatcgaacgtatgtccagcgattttgccgtgatatagacctgcgatttgggtgccgtggccatcagccgatgcctgagccccaccaagcggcctgacgtgctggttacggatatgtctaggcgcattggaccgcacgcatcaagtcattgatgtgattgaaggcaggggagaagcggcgcacagtgcagtgactccgcatgattcgaccgttgataccgctcctggcattgcatgtgacatcacagacgctgattgtccgctggagacgcagacctatccaccggcaccggcctcaaccgttaccgacaattactagaacaacaaaacggcgccctgcatgtcaccgcgcaagacgccgaatggacattatcagcagttattccactgtgaggaaaccgatcacccaaccgacttctgcgcagtctccgcgccaaagaagccgacaatcagcatcgatgcaatagcaatcgcgctgatggccacaaagatggacgtggcaccaagcgaggtaagcatccagcccaccaccatcggcatcaacacattgagcagcttggccacggcgttcgcgaagccgacgcaacggaagcgaaccttggtggcgaacagttccggagcgtacacagccaccacggaagccataagcacgtacaggcacatcatgagcaggaagccaacgataattgcgctcacggtagaggtctggaaggcatacattaaaccgaacacgccagtgaacaggaaggccggcacaatcgtgcgcttgcggccgatacggtcgataagcagagagccaatcaggcagccgaccggggcaccgagcatcatcaccgtggaggtgagcagcgagctggacaggttaataccacgcttgaccagaatcgtcggaacccaagaagtgaaggcgtaggagcacacgttcgtggcggccacagcaaccacagccacaagcaggcagatgccgagcgaacggcctccggcgttgcgggtgtcgctggtgtcggccttggcggctgcgtcgatcggttcggaaccgttggcctcaagctgcttgacgatggcgtcggcctcatcgtaacggccgcgcacggcgagccaacgcggggattcggggatgtcgcggcgcagccaccagatgatggcggccaccaggccgatggccacgaacagcggacgccaggaccagcgggggatgatccatgcacacagcagcatagcgattggcacaccgcagttggccacgagcgagacaatcgcgcaccagtggccacggcggttcatcggtgcgaactcgttgaccatggcgaagccggtgacgatttcagcgccgaggcccaggccggcacccagacggcacagggacagcacagccatgttcggggcgaatgcgccgaggaaggtgaagccgccaaacagcagcaggttgatttggtaagccacgcggcggcccttcaggtcaccgacgaagccggccagcagcgaaccgaccagcagacccaggaagcccgcggacataaaggtggaattttgcgcaacggtggaccagcgggtagccaacgtgctggaggcgacggcgctgccaatatatacgtcgatgctgtccatcagcatgccagcggcgaccagcgtcacgatgcgatggaacatcggggtttcatgtgcgcgatccatgcgcgagataatatcctgaaccttggcttgatccgtcacggtggtacgtgcttgtgcgttttccatagccgcgggattgccggaaatctgctgttcagcagcagtcatatttgagccctcttcttgcaaacctgcccgcgtgcaactgctcaatggtgttgcggcgagcgaactcttgattggactgcgtgttccgttcgccctcccattgtgtgggatgaacgacgtttgcggcccaagtcttgaattccacgtagcgagccaatcgttgtgagatagctcactgcatggggcttaactataggttcgattttgtggcacgccgtattgcggtcacatcgtgaacgataacagaggttgtaacgctcctatatgtgccacacttgcgctcttaccccatcgaaagaaggtggaaccgtgattcccatggggcggtaaaacactcatggggcggtatttggcccatgaggcggttagcggattttgcctttccgcagaatagagccgttttcgcctaccgccccatgagggttttaccgccccatgagatatttaccgccccatgagatatttactgccccatgagatatttactgccccatgagatatttactgccccatgagatatttaccgccctatgggtgagttaccgccccatgaaacgtgtaataacaaagcatgcccttgctggtggaagcaatgctttgctacttcgcctgcttgtcggcgaggatcttatccaccagcttgggcttttcggtcagctggccggtgaagccggggcggatatccatgtgcagcaccagagaagtgcggtagccctgctcggcgagcttcttggcggcctcaccggccaacttgagcacgtcgtccagattgccttccacgttggtgaacagggcgttggtttcctgcggcaggccggattcgcgaatcacctcgacggcctgagccacgtatggcgaaacctcggagcccacgccattggccgacacctgaatggcggccacggtgttgaggtacggtttgccggtttccgggtcgatcggcacttcctgagtaacggcattacggtcaataatcatgattctccttttattacttggctcccctcagagaggggagccaagtaggactcagcgatacttccagaaatgatccatcgggccggagccgtggccaagattcagctgggccttcagcgcaccggtcagatacttcttcgcatgcttgatggccttgggcaatgtgtcgccaagcgccagatacgaggcgatggcggagctcagcgtgcatccggtgccgtgcgtgttcggattattgatacgcacgccatcaaaccaggtcacggttccatccgtctcggcaagcacatcgttggcatcctcggtgccatgaccacccttgaccagcgcggcacagccataacgctccacgaggcggtgggcggcggcctccatatcctcctgatcgcgaatcagcgtatcggtcagcacttcggcctcgggaatgttcggagtcacgaccgtggccatcgggaacagcttgccggtcaaggccgcagtggcatcgtcactgatgagcttggcaccggaagtggccaccataaccgggtcgagcacgatgttcgtggcgtgatggaaggtgagtcgttcagcaatgacgtcgatgatgtcagtggcagacaccatgccgattttcaccgcgaccggcggaatatcctcaaacaccatgttgatctggtcggcgagaatgtccggtttggtgtcctgaatggaacgcacgccggtggtgttctgtgcggtgagcgcggtgatggcgctcatgccgaacacgccgcaagccagcatggtcttcagatcggcctgcatgccggcaccgccggacgagtcggagccggagatcgcgagaacagcgggcagtgtagatgttgcaatttgtgccatagtgttcattctaagtggggcccatgatgtttttcggagcgatttccttgatgttttgccgctcctgtggtgagatggggagggtttgctgattgcgattgattcatgaaatgttcgggaggggacatggctgataacgatgtactgcgccgtgacggcgtcttggtgcgcatcaccggttttgacgatgaacgcaccgcatattttggcgtaatgcctaatgggcacaccacacagctcacatttccgcgtcaggaggtgttcgatgtgggcgacgtgttgctcgtcggcacggatttctatcgtaaagtgccgcatgatgtgtggccgttgaagccccgtgtgggcatcgtgcgccgtgcgctcaacgaaggcgtggtcctggagacttccgacggcctcgaactgcttgaaggcgattacccgaattcgatcatgcccggcaacaccgtgcagttcaccgacctgttcggcatcgaacgagtgctgtggcccacggccatccgcccaggcgaatccgatcacgatgacgacatcaagcagtaccgcattacgccgggcagcgatccgtcgcttaccttcgattcgttcggcggttatgagcaggtgatcacgcgagccaaggagcttatcgaaacgcagctgggcaacagtgcgcagatgcgtgcgatcggtgccaagcccatcaagggcgtgatcttcaccggtgctccgggtaccggtaaaacacatctggcccgcatcatcgccaatgtggcggacgcgcagttctatctggtgtccggcccgaccatcgtgagcaagtatgtgggcgatagtgaggaaacgctgcgcatgattttcgccgccgcgcaggcggacaagcgcgccatcatcttctttgatgagatcgattcgattgcgtcctcgcgcgagaacgataccaatggcgtcggcaagcgcttggtggcgcagttgctgacgttgatggatggtttcgagtccaagggcaatgttgtggtggtcgctgcgaccaatcgtattgaggacgtggatcccgctttgttgcgtccgggccgtttcgactggcagattcctttcccgatgccgtccgagcacgaccgtttgggcattctgcaggtgcaggcccgttcgttgtcaatcgagggcgaactgccgttggcggatatcgcacagcggaccgaaggctggagcggcgccgaagtgtgcgccatctggaccgaggccgctctggtggccgccaaggaccgccgcggcgcgatccgtgctgccgacctcgtcaccgccttcgagcgagtcgagcgtcgtcccgaattaagacaccaccgggcataataattggctcccctcagagaggggagccagagaggtttactcctgggcggtggagtagagcttgccgccttgggcggtgtacttttcgctcatcgcatccatgccggcgaggatttcttcggggctcagcacgttggcggacaccacgccgttatcgacattggccttggccttagccagtgcctcggagtcgatgccagcagcagcctccttcacgatttgctgctgagcggcctcgccaccgaatgccttgcggatgttctgggagatggccatcgagcagaacttcgggccgcacatcgagcagaagtgcgccatcttggccggctcggcgggcagggtgtcatcgtggaaggcgatggcggtgtccggatcgtaggacagattgaactggtcgagccaacggaactcgaagcgagccttggaaatcgcattgtcacgatccatcgcgtgcgggtggtgcttggcgatgtctgcggcgtggcaggcgatcttgtaggcaatcacgccctgcttcacatcatccttgttcggcaggccgaggtgttccttcggggtcacgtagcacagcatagcggtgccgtaacgaccgatctcggtggcgccgatagcggaggtgatgtgatcgtaacccggagcggtatcggtggtcagcggtccgagggtgtagaacggggcgttgtggcacacggccttctccagctcgatgttcatgcgtacggtgtcgaacggcacgtggcccgggccctcgatcatcacctgcacgtccttggcccaggcgcgctcggtcagctcgcccagagtcatgagctcggaaagctgcgcggcgtcgttcgcgtcggctagggagccggggcgcaggccatcgcccagagagaacgccacgtcgtacttggcgaagatgtcgcacagctcgtcgaagtgcgtgtacaggaagctctcctggtggtggcgcaggcaccagtcggccatgatggagccaccgcgggagacgatgccggtcacgcggttggcggtcagcggcacgtaacgcagcagcacgccggcgtggatggtcatgtaatccacaccttgctcgcactgttcgattacggtgtcgcggaacagttcccagctcagcttggaggcatcatcctcgaccttttcgagggcctggtacatcggcacggtgccgatcggcacgggggagttgcgaagaatccactcacgggtggtatggatgtcgttaccggtggacaggtccatcacggtatcggcgccccacttggtggcccacgtcagcttctccacttcctcatcgatggaggaggtgacggccgagttgcccatgttggcgttgagcttggtcaggaaggcggatccgataatcatcggctcggtctcggggtggttgatgttgcagggcatcaccgcgcggccggcggccagctcggagcgcacgagctccacatcgcagttctcgcgggtggccacgtactgcatctccggggtgatgatgccgtggcgggcgtaccacatctgggtgatcgggtggtccttggcgcgcatcggctcatgcttgcgtccacgccattccttggtggcgcggccgcgcttgatggcgcgcttgccatcgtcctcaaggttgcggcggcgaccctcgtagtcttcgatgtcgccgcggtcgcggatccagtcgagacgcaggggcttcaagccttccttcgggtcgcacttggggccttcggtgttgtagtcgcggaacggcgggttcgggcccacgccgggcgtgtcgctcagcttgatttcggtgtacggcacttccaggtcgtaggaaccatactgataggtgaacggtacggacttggtcttgcggatgtgcgccttgtcgcgctgcttggaaccacgggcggcgatgtccacgcgctgctgcttggcaagcttctgggcatccttggcgtccttggcgttggtgaacttcttctcagtggcctcggaaccgggcttcgcggccccttcctgagcagcctgagtgtcagtagcgggggtgtgggttacgacgcgcggagcgtagccgtgcttcttgtcgccgcggacggccttccagccttcgaccatggtgcgcgcggcctcttccgggttctcggcacccgcgatggcggagaccacgaaccagccagcagccttggtatcggcgagcatggccatatcggctgcggtcacgccgccgcccacgaccaccgggaattcgctggcaacgcagatggtgttgatctgggcggcgtccagcgtcttgccggagccgtcgttgccgcccacggaagcctcgggcttggtggtggagacgtgcagaggaccggcgccaatgtagtcgatgcagccgtcgggcagctcgttgatgagccgaacgaggctttcggtctcagccgacaggcccacgatggcctcgtcgccgagcagggcgcgggcttcgcgcggctccatgtcggtctggccgatgtgcacaccgtccaccttgatgcccttgcggcgggcctgccacaccacgtcggcacggtcgtcgatcacaaaggccacggaatcggacttctcattgtcctcgatgatttgcgcgatgtcgcgagccatgtcggtcagctcagaggcatcggcctccttggcgcgcagttggatgaaggttgcgccgccgtgcagagcctgatccaccacgtcggtcagcggacggcctttgcagtcctccggccccaccacgaagtacgcggacaggtcgaagctgtcgcgcatggaggcgtatgggtattcattactcattattattcctgcttttgttgtttcttgtggaagtcttattggaaaaaactgttatgagctccctcatcagagggaactgaaactactgcaccaatatctcggattccgccacctgttcggcggtcacattccacagcgcgtcaaggaacgcaacttggaacgagcccggtccgtgcgaagttgtatcggccacctctcccgcgcggttgtacagcagagacgcggacagggcggcggtcaacggatcggagaccgccaaatacgtggcagccacgccgcccagcgagcagccggcaccgatgatcttggtcatcatcgcgctgccgcccggcagtcggtacacggtttcgccatcggtcaccagatcggcgatgccggacacggccacggcgcagcgggtggaagcgtcatgggaggaatgcttggcgtgctgttcggtcagatactgtgccagcgccaccgccgcgccggttgcggactccacgtcgtcgacggattccactccggcggggcggtgctcggaagcgtcccccacggtttcggtattgagcccccacatgttcgccagcgcgattacctcggatgcattcgcgcgaatcatggtcgggggagcggccttgaaggcctgaagaatggcggtacgggtgcggccgatgccggcggccaccgggtcgagcacccacggcttgtccaagtagttgagtcgctgggcgatttcgggcagtgcgtccttatagaacggcagcagcgtgcccacgttgatgtagttcgcgcccgcgattttcgcggtttcgatcacgtcgtccggcaggaaactcatggccgcagtgccgccggccgccagttgcgcgttggcaaccaaattgatggtcacaaaattggtgaatgactgggccaacggagtcgtctcgcgtacgcggcgaacggcatcggcgatattgtcacggatgggtgaatcggctggaaccggagtcccggcggtataaccgctggacacgccggtaaacgatgatgcactattgctcatttactgctccctacgatggtcttaaccaacaggttctaagggtcaggctcaggcctttctcaactcgcgaaccacatgcgagttcccctgcattacagtgccgacgctatgcgccaacatggacattatcgtgacggatttgttcgatacgtgtcgtcaggtctggcgcgtccccgtccattcgtgatacatagacgcctccgccgagcaacatctcccgaatttgtgacgctgacgcgatgtcagtggcacaaattcgggaagggtaaaacaacaggaacaatatggaggtgttgcgatataggaatcgctgcgaacggccgctcgtgagacgcggaacatataccggacaatgccgcctgacctgtcaccatatacggctatcctgaagcggttgttattagaccccaaaccgttcaaaccagaaggtgcattgtggctcagtccaaactcgatgaagtcgtatcccttgcgaagcgtcgcggcttcgtgttccccgccggcgaaatttacggcggcacccgttccgcttgggattacggccctctcggcgtcgctctcaaggacaatatcaagcgtgaatggtggcgctccatggtcgtcacccgtcctgatgtcgtcggtgtcgacacttccatcattctgccgcccgaagtgtgggtggcgtccggccacgtgagcgtgttcaacgatccgctcgtcgagtgtctcaactgccacaagcgcaaccgcgccgacaagctcgaggaatcctacgccgagaagcacggcgacaagatgccggaaaacggcatgaaggacatcgtctgcccgaactgcggcacccgtggccagtggaccgaaccgcgcgacttcaacatgatgctgcgcacccacctcggcccggtcgaggacgagaacagcctgcactacctgcgtccggagactgcacagggcatcttcgtggacttcaagaacgtgatgacctcttcccgttccaggccgccgttcggcatcgccaacatgggtaagtccttccgtaacgagatcaccccgggtaacttcatcttccgcacccgtgagttcgagcagatggagatggagttcttcgtcacgcccggcaccgatgaggaatggcaccagtactggatcgacgcccgcacccgctggtacatcgacctcggcgtcaagccggagaacctgcgccactacgagcatccgaaggagaagctctcccactactccaagcgcaccgtggacatcgaatacaagttcggcttccagggttccgactggggcgagctcgaaggcatcgccaaccgtaccgattacgatttgagcgcgcactccaagcactccggcgaagacctgagctacttcaaccaggccaccggcgagaagtacgtgccgtacgtcatcgaaccggccgccggcctgacccgctccctgatgtgcttcctcgtggacgcctacgatgtggacgaggccccgaacaccaagggcggcgttgacaagcgcaccgtgctgcgtctcgacccgcgtctggccccggtcaaggccgccgtgctgccgctgagcaagaagcctgaactgcagaccgtggcccagaacctggccgacgacctgcgcttcaacgagtggatgatcgactacgacgagtccggtgccatcggtcgtcgttaccgtcgtcaggacgagatcggcaccccgctgtgcatcaccgtggacttcgacaccctcgaggaccacgccgtgaccatccgtgagcgtgacaccatggcccaggagcgcgtcgctcttgacaaggtggccgattacgtggccgcccgcatcggcgagaagcgcacccgcgtgcccctgaagcccgtggaaatgggcggtgagccttggcctgagtccggcgttcaggaagccggcggtctgtactaaagacgggtctgtatagaggctcccctctatgaggggagctgtccacgaagtggactgaggggagctcttgctgaggcgactcccctcagtcgcctacggcgacagctcccctcaaagaggggagccaaagctatttcagaacaggaaccacatggcagaatctgaaaccgaaaccaccatcaccgctactcacgagaccaacaatctcgacccgcgtacggacgcgccggcacggcccgagactccggtacacatcgcccccgtgcagctcggcaacattaccgtgccgaccccggtggtgctttcgccgatggcgggcgtgaccaactggccgttccgcgtgatctgcgaggaatacggtcccgatggtctttacgtggccgagatgatcaccgcgcgggccctcgtggcgcgcaacccgaaagccctgcgtctctgccatttcgccaaaagcgaaaaaattcgttcgctgcagttgtatggcgtgaatccgtccatcaccgaacaggcggcgaaaatcgtggtcgacggcaacatggccgaccatgtggacctgaacttcggttgcccggtacccaaggtcacccgtcgcgggggaggctcggccctgccatggaaaaccgacatcttcaccgagctcatccagcgcgtggtcgccgtatgcgagccggcgggcatccccgtcacctcgaagatccgcgtcggcatcgaccataaccatgagaccttcctcgaagccggacacatcgcgcaggaggagggctgcaaggccgtaaccctgcatgcccgcaccaccgccgaatactatggcggtcattccgactggtcccgcatcggcgagctcaaggaacacctcaacattccggtattcggcaatggcgatatctggggtgccgaggacgcgctcgaaatggtgcgcgagaccggctgcgacggtgtggccatcggccgcggatgccagggccggccgtggctgttcgccaacatcaaaaacgccttcgagggcaatcccgaacggctcaacccgaatctgggcgaggtctgccgcgtgattcaccgtcatgccgagctgcttaccgagttttatgagggcgatgagatgatggccgtccacgatctgcgcaagcacatcgcctggtatctgaaaggattcccggtgggcggctccacccgcaaggcctttatggaatgcgagagcctggccgatgtggaccgcgagatcggcaagctcgacccgactatcgaatacccgccacgcgtggtcgacaaaccgcgcggccgcgtgcgtttcgccaagaaggtgcacttgccgtatggctggttggaatcgcgtaccaccacccacgaagagcgtgaggcgctcttcggtgacgacccaatggacgccagttactgagaaaatactgaaaatacacgcaacacgcgccattctgcgcgtgaatttccctccaagagtagcctgtttgcgctactcttgggtgtaaccgtgaagtgacaggagccaaacgtgagcgagatcgcgcagaatgagttcaacgacaagaccaacatcaaggttgttggcgtcggcggtgccggcggtaatgccgtcaatcgcatgattgccgagggattacagaatgttgaatttgtggcggtaaataccgatgcgaaggatcttctgcgctctgatgcggatgtcaagatttccctttccgataagtccagtcgtggtctcggtgctggtgccgacccggagcgtggagccaaggcggcccaggaccaccagtcggatatcgaagaggcgcttaggggtgccgacatggtgttcgtcacctgcggcgagggcggtggcaccggtactggcgccagcccgatcgtcgctcgtgcggctcatcaacagggtgctctcaccatcgcggttgttactcgtccgttcagcttcgaaggccctcagcgttccgcttccgccgaatacggcatcgacaacctgcgcaaggaagtcgacgcgctgatcgtcattccgaacgatcgcctgctcgagctttccgaccgttccatcggcatcattgaggccttcaagaccgctgataccgcactgcttgccggtgttcagggcatcactgacctgatttcgatgaactcctatattcacgtcgacttcaacgatgtgaactccattcttcgtggtgctggtactgcgctgtttggtatcggttccgcacggggagaggatcgtgccacgcaggccgccgaaatcgccatcagctctccgctgcttgaggaaagcatcgaaggcgcacacggtgcgctgatcaacatcgccggtccgaccgacctgaagttgcaggaggcctctgctgccaccgaactggtgcgcaaggcgattcaccctgaagcccagattatttggggtcttgctctggacgatgcttatggcgatgaagtgcgtgtcactgttattgctgctggttttgaccccgtcgccgctcaagatgacgacactcagagcacggtgacgccggttgtgccaaccgccgccgatcctgcgactcccgtggcacagccagctccagcaccggcaccggctgcacagcccgctgccactgcccaaccggcattcacaccggctatcggtgactccgcatcgttgccttttgatgatccgacttccgctcatccgaatatcgccgtgaacgatccggctggcgatctcgacatccctgacttcctgcgctgaaaggattgatccatggctgggttcatgaaaaacgcgatgtcctatctgggcatgagtgacgttgtggacgatgaggacgactacatcgaggaggacgaggagcagaagccggcttcgaagtccgcatttgattccgaccatacggtcacgccgctggcgtcaaccaccgcgcctgccgcatcgtcgactaccaagccgttccccggtggccgtgtgaacagaatcaccaccatccatccgaagtcatatgaggatgctcaactggtcggccgcgcattgcgtgacggtgttccggtcgtactgaatctcactggtgtggccgaagccgtggcatatcgcatcgtggacttctccgccggcgtggtgttcggcgtgcgtggttccctcgagcgtgtcactccgcgcgtgttcctgttgagcccggcgcaggtgaacatcaaggtcgaagagccgacaaaaccagcctcggcacacgatttgttcgctgactgaccggttcagtagttttcgcattcgacgttatatcggtattcggccgactcccagcaaggagtcggccgattcttattgtgctccgagcaaacttttcatgcgcggttgttagtctgtcagcatgctttccttagtgttctctttgatcggccgcattcttgcatggctcatcaacgcgtatatcacggttctgttcgtgcgcatgattctggactgggtctccgttctcgcacgaaactggtatccacgtggtgtggtggcccagctgatcaatattgtgtattccattaccgaaccccctctgcgctggctacgtcgctatattcgcccattgccgctcggttcgatttatcttgatgtcagcttcattgtgctgtattttgcgctggtggtactggaaagtgttgttctgatagtgttctgaggccgtttttgacccgccggaggcatatatctggcataaaaacccacgtcgaatgttctgaaacgatggggtcgtgatagcattctgacttgagaccaacgtaagtgcgggcgatgccccaaagcgaggtgcaagatttatggctctgttgacgccgaaggatattagggagcataccttccagactgttcgattcaaggaaggttatgatgtcgacgaggtcgatgacttccttgatcaggtcacggaaaccgtcgaggctcttggacgtcaggcggtagccggcggtcaggccacccagtctctgggtcctgacgtgaccaaccttaatgcgaagatctccgatcttaccggtcaggtgcagcaactcgagtcggagaatgctggtttgaagaacgctgtggctcaggcccagcaggccgctcaggctggcaatgatcaggcagcacagcttgtctctgccaagctcagcgaagccgaggaatccaaccgcgcgctgtcctcccagaatgagcagctcaagggtcaggtcgatcagctgaacgctcaaatcgatcagctcaccgctcaggctgctcaggcctccggtgaccaggaggctgtcggtcagcagatcgccgccattcagcaggaacgtgatcagttccgcgcggccaatgaggagctgtcccgtcagctcgccgccgctcagcagcagggttccgccgctcagcagcagtccgctcagatcgctgagctgtcccgtcagctcgaagaagccaagcagcgtgaaaaccagcttcgtgctcaggtttccaaggttgagccgagcaccgagaccggttctctgcagaagatcgctggcgccgcttccatgccgggcaccgagcccgagcgcgccaccgccatgctgaccctggctatgcagctgcacgatcagtacgtggagaagggcaagaacaaggccaaggaaatcaccgaggccagccagaacaagtacaacgatctggtcaccaaggccaacaactactccgagcgtacccgttccgaggccgacgactactccactcgtactcgttccgacgccgacacctattcggatcgtacccgctccgaggccgacgcttaccgtgaccagactcacgcggatgccgagacctactcccagaacacccgttctgaggccgacgcatactccgtcaagactcgtcaggatgcggacaactactccaagtctcagcacgatgacgctgacaactacgagaaggaagtgcagcagcgtgccgccgagtatgacaagaacactcgttccgcggctgatgcgtacgacaagaacacccgctctgcagccgatacgtatgccgagcaggtgcgcgacaaccttcaggctcagtccaaggtcgtcgagggcaacatccagagcctcaagcagttcgagactgaataccgcgcccgcctcaccgagtacctcggccagctggcatcgcaggtttccgagtcgaacaactacgtcgaccagacctcgtccaagaccaactgagcgtaggcaggtacaggtcgtatgacgaaccaacagggacggctgcgcacccgcgtggccgtctttgcatgtgtggccgcggctgcgctgattgtcgatcagctcaccaaggcttgggcgatggccgcgttatccaacggtcagaccattcgcgtgattcccggactgctgtccttcaccttggtgcgtaatccgggcgcgtccttgggcatgggatcaggcgctacttgggtaatcagtctgttggccgttgtggcttgcgtggcccttgctgtggctggggtgcgcactgtctccatgaaatggtcggtggcgatttctttcgcgtttgcaggcgctctgggcaacctgattgaccgtgttatgtacgctgacggcttcctcgacggcaaagtggtggatttccttaactatggctggtccgttggcaatgtggcggatatctatctggtagtcgccggtgtggtcctggtgattctgattcttatgggggagccgttctcacacaaggatctcatcgagcaatccgacgaatccctacagtctgagccggaggcggacgccaagtaatgagtcgaatagtccctgctcccgatgcattggtgggtaagcgtttcgacgtagccgtggccaaaatgctgggtatttcacgatctaaagccgccgatctggttgactccgggcaggcgcgcgttttaggacgtgaagttgcgcggtccagcacattgcaggcgggggagaccgtcgaatttgatttggcggaggaacaggccgagcctgagcctatcgcaactgatatggccgttgtctacgaagacgatgatgtcgttgtagtcgataagcctgtaggcgtggcggcgcatgcctcggttggctggaccggtccaaccgtgctcggatcactgcgtgaccgcggcgtgcatatcacttcctatggtgcggccgggcgtgagggcattgtttctcgccttgatgtaggcacttccggcttgatgttggtgtgcaagtccgaccttgcgtacaccgagatgcgtcggcagttcgccgagcatgaggtaaagaaaacctatcatgcgctcgtgcagggtggtcttaaagagaacaaagcaaccattgaggcaccgatcgggcgcgccaaagtgtccgatttccgcttctgcgtgactccggccggcaaaccggccgttacgcactgggatgtgctggagcgtttcggccatgaggccactctggtatccgtgaatctggagaccggacgtactcatcagattcgcgtgcatttctcctcgattgggcatcccctgtgcggcgaccccatgtatggtgccaatccggtgctgtctgaggccttgggacttgaccggcagtggctgcacgccatgaagctcgaattccgtcatccccgcacccgcgtctggaccacggtccggtcccagtacccggccgacttggctgccgcactcgatgccatgcgtgcccgacacatcgaacccgctgaacctgccgaatatgccgaagttctggtggactaattccgcgacgtgtgcatcatgcgttttaatatttagattcagttccggcttcgccggattcatcccagaataacgagagatcggtcatgatggctctccgtcatgaccataccccaagtgactgctgatgctgagtaccattcaggccaatggtcggtaaccgtacgtgaattaccggtatttccgctcaacgtgtctcggtactccagcgtgaagtgaacagaaatgagccaaagcagtaatgaagccgggcggtatatgccatccggattgcagaatctcctgctgataaaaaccgtttcctagtcgttgaccgtgcccgttccgacgacgatcgcggcctacgacgcgttcatcctctacccggcccaccgatacgacatcaagggcaagaggattctcaagcaggaaaagaagtactatgccgtggacttggggatgcgacgtatcctgtgctccaacaacgtgcgggacatcggacgcctcctcgagaacgtggtgttcctcgaactgatgcgccgcgagggcgacgtgtatgtcggacagagctccggcggcgagatcgacttcgtcacgaacgggccaggcggacgtcggtactaccaggtcagcgaatcggtgcacgattcggcgacgctggatcgggagccgtcctcgctgcgcgccgtgcgtgacaactatcccaagacgctgattacgctggatgacgaacggccctactcccacgaaggcatccgacagatatacgcgcttgactggctgttgaacgaagaccacaagaaacagtagatactagggcggccagcgggttagcaagacatcagttggtgaggactgctgacattgcactccgacggatgaattgaatactcatatggtatccgattctgaacaattgagtgggggcgttgatggttgccatcgtttgagctggctaaatgcgatttcgcgccatgctgtttcaacaacggtgacaacggctacagttgaactatgcatgggttgaagagtgcgattgacaggggagcggacgcgtgggcacgttcgctgcctgggcgcgtgctcgaccggtatgtgtcgcggagcggccccctgctggcgaatggtctggcatatggtctgctgttcgccttttttgccggcgtctggattgcggtgagcgtgttcggccttatcatggtcggcaacattgattggcagcagatgctgatcgacgcggtgcgtgaagtcattcccggtgtggccgactcgtttctgacgtcttccgcgctaggcaccatgtcaagcgcattgacatggaccggtctggccacgttggccatattctggtggacggtgaccggctggatgaactcgctgcgccacgccgtacgggccatgttcgacgactgcggcgacgagctcaatatcgtcgtcgcaaggttacgcgatacgcttgccgccatcgccatcgcaatactgttcattctttcgaccgcggccggtacggtgtccggcggcatcgtacgccgactgctgcaatggggcggcatccccagcagttcgttgcccggcaccgtgcttttggagatgaccggtttcggtaccggcgtcgcactgaattttgcgttgttcatgttgctgctgcgcgtggtctcccacatcaaagccggacgattcacgatactcggcgcgttactgggatctctgacggtttccgcaatgcagcttctcggtgcgcgactattagccggagcctcccggaatccgatgcttgccccgttcgccgcgttgatcggtgtgctcatttggttcaacctcgtcgcccaggtcattttgctctgtgccgccctcattgccgagtgccgacaaaagagctgagcgtctgaactgactaatatgacgattagcgatgaagcctctctcgccgagatgattcgcgaactcagctggcactacagttattgccgtggtctctccatcttggcatatcgcaaacgagtagcttcacccgtgataccgagcttgcgaccaattgtttcccatgattggccacgttcatgcatgagcagtaccttctgcgcaatgcgggcatcaatgtattccagttcggctttgcgtcgattgattagacggctgagctccagttcgggagagaagtttgggctgtcctcgggaatgccttctgctggtgattcctgagactccacggcatctgccgcagcgttgccgatttccatgagtttggcctgtatctcgggagagtagtcttcaaatttcatcgttatcactgccttagtgtcgctgttgctgatactccactttataggcatgtggcctcaccggtaaatatttaccgccgcccagaccacacggtatggtggagcgcatggctgattacgggaacaactttgtgcaactgcataaccatacgcactattcgctgctcgatggtgcgtcgaagattcctgatttggccaagcgtgcggccgaacttggcatgcctgcggtcggtatcaccgaccatggcaacatgcatggcgcctacgagatgtacaccaactgcgtggccaatggcgtcaagcccatcatcggcatcgaagcttacgtgaccccggaaaccgcgcgtcaagacaagtcccgtgtgcactggggcaccgaagcccagcgccgcgacgacgtctccggtggtggtcttatcacccacttgaccatgtgggccgaaaacgacgaaggcctggtcaacctcatcaaagcctcgtccgtggccaacctcgaaggtcgcgtcatgcgctacccgcgtatggataaggaggtgctcgccacctattccaaaggtgtgatcgcctcctccggatgcccttcgggcatcatccagactcgtctgcgcctcggtcaattcgaggaggccctgcgcgccgccggcgaattccaggacatcttcggcaaagacaacttcttcatcgaactcatggatcacggtctgacaatcgagacccaggtcaccaacgacctgctgaccattgccaagaagctggacgccccgctgctggccaccaacgattcccactacgtacacgccgaagatgcacaggcgcaggacgccatgctctgcatcaactccggttcccgtcttgacgatccggaccgattcaagttcgacggcaccggctactacatcaaaaccgccgaagagatgcgcgaactgttcaaggaccacccggacgcctgcgacaatacgctcgttatcgccgaacgctgcaacgtgatgttcgacgaccacgaagacggcgcgttcatgccgaaattcccttgtcccgaaggctgggatgagacctccctgttcctcaaaaaagtcgaggaaggtctggagaagcgttacgacggcaacccgccgctcgacgtattgaagcaggccgactacgaatgcggcgtgatctgccagatgcagttctgcggatacttcctcgtggtcgccgactacattcagtgggccaaggaccacggcattatggtgggtccgggccgtggttcggccgcaggcgccatggtcgcctattccatgggcattaccgagctcgatccgctcaagcatggcctgattttcgagaggttcctgaaccctgagcgagtgagccttcctgatatcgatgtcgacttcgaccctgaaggtcgtgcgcgagtcatcgaatactgcggcgaaaaatacggcaccgataaggtcgcccagtgcgtgatctatggcaccatcaaaaccaagcaggccttgaaggactccgcccgcatcatgggttatgaattctcagtcggtgaaaaaatcaccaaggcgctgcctccggcggccaccggcggcaaagacatcagcctacatgacatcttcgacccggccgccaaacgttatgccgaggccagggaattccgagaactctacgattccgacccggacaccaagcgcatcaccgaggaagccaagggtatcgaaggcctgattcgacagaccggtgtacatgcctgcgccaccatcatgggtagcgcacccatcaccgacacctcgccgttgctggaacgcaccgatggcaccatcaccaccaccttcgaataccacacgtgcgaaacgttggggctggtcaagatggacttccttggcctgtccaacttgacgatcatccacgacaccctgaagaacatcgaggccaacggcaaacccgccatcgactacaccaagattccgctcgatgacgccgaaacctacaaactcatgtcccgaggagacacgctcggcgtgttccagctcgattccgacggcatgcgttcactgctgaaaaccctgaagcccgataacttcaacgatatttccgcacttatcgccctgtaccgaccgggcccgatgagtatggattcgcacaccaactacgccaagcgcaaaaacggcctgcagaagatcacgccaattcaccctgagcttgaggagcctctgaagcaggtgcttgacgagacctatggtctgatcatctaccaggagcaggtgcagtccgccgcccgaatcctcgccggttattcactgggcaaggcagacgtgctgcgtcgagccatgggtaagaagaagcccgaagtgctggccaaggagaaggtgccgttcttcgccggtatgaaggagcacggatattccgaagaggcctcccaggccgtgtgggatattctggtgccgttctccggctacgctttcaacaaagcgcactccgccgcatacggtctgatctcctactggaccgcatatctgaagacgcactacccggtcgaattcatggccgccctgttgcaaggtgccgccaccaacaaagacaagaccgcactgtacttgggcgaggcccgccgcatgggcatccaggtgctctcgccggacgtcaacgaatcggtgtacgagtactcggcagtcggcgacgtcgtccgattcggtcttggtgccatccgtaacgtgggtgacaaggccgtggccgatatcatcgccgaacgcgaaggcccgcgcggcaagttcgtgaacttcatggacttcatccgccgcgtgcccctgaccgcgctgaaccggcgattggtcgaatcgttgatcaaggccggtgccttcgactcgattgacccgaaccgtcgcgcgctgctcaccgtgcacgaggccgccatcgattcggtggtgagtctgaagcgcaaacaggcggagggccagttcgatttgttctccgatgccgaggatgggggagcggaggccatgggcgacgcttccgtgaccgtacccgatcttgaggaatgggacaagaagaccaaacttaacttcgaacgcgaaatgttgggcctgtatgtgtctgaccatccgctctccggtatgcagtcgattctcgcgtccttgcgtgaaatgtccatcgcgcatctggttgatcgagccaaaacgatgggtgaaggacagcaggtcacgttggctggtttggtcaccaatgtggaccggcgcgtatccaagaagggcaacccctgggccatcgtgaccatcgaagacatggaaagctccatccaatgcatgttcttcggcaaggtctatgaagcggccgccgccgaacttgccgtggacgccatcgtacagattcgtggccaagtggagttgcgcgacgaaaccgtttctctgagagccacggaaatgcagattccgaccttggaagccgaggatgaacgtccgttggtcatcacgctgccgccggtggcgttggagcgccaacgcatgatgcaactcggtcaggtgctcgctaatcatcctggttactgcgaagtacatcttgcggtgctggatgagaagggtaacgctcaggtgctcacgtttggcgatcgtttccgcgtcaagcgagatacttcgttgtttgctgagatcaagattctgtttggccccagctgcttgcctgccgcctgattggcgggtttcgcccctggcctctccctcacctggctttgctgggggctccttcatcagagggagctaaggcgtgtgccaccatacgatgtgcgcgactactgtggaacgtatgggcatggagatggcggatactggtaacaacgatgacgagcgacaatggattgccacgatgctggaacggctgtctcattcgcagttccgcgccaaattcgctttgaccgacaaagaccgagcctatgcccgcaccaaaggcaaggcgaccatcgatcgtcatgcgcgagaaatgttgcgagaccgcataggcgcagccgaaccgaagaacgacggcaggcagacgccatggcgcggccatccggtattcaccgctcagcatgctaccgccacatgctgccgcggatgcatcgaaaaatggcatcatctgcccaaaggccgtgaactcgccgaagcggaggtaaaccgacttgccgatttggtcatggcatggattgagcgggaccttatcaatcatccggttcggtgaagcaccccgcatcctcagtatgcctgtatgccttcaatagttatgagccaacagccaacataggcctcgaaaaccgtagatgcaaggtattggcgaatgcggcagaacgccgaacgttgcctatggcgcgttcgtcaataatgcgacatgatgtctattcaagaagagttgatgaagtgtcaactctgccccaaggaggcggaatatgtactacagcagcggcaattatgaggctttcgcacgtccgaagaagccggccgacgtggacaacaagcatgcatacatcatcggtaccggactggcggcattgtctgcagcctgttatctggtgcgtgatggtcagatgcctggcgagaacatccacatccttgagaaggacccggtacccggcggcgcctgtgacggtcttgatattcccggccttggctatgtgatgcgtggcggccgcgaaatggacaatcatttcgaggtcatgtgggatctgttccgctcgattccctccatcgaaaccgaaggcgtcagcgtactcgacgagtactactggctcaacaaggaggacccgaactactcgctgtgccgcgccaccaagaatctcggcaaggacgcggggctcaagggcaagttcgggctgtccgacaaggcttcgatggaaatcatgaagctgttcttcaccccggacgaagacctgtatgacaagccgatcaccgatttcttcgatgatgaggtgctggactccaacttctggctgtactggcgcaccatgttcgccttcgaaaactggcactccgcgctggaaatgaagctgtacatcaagcgctacattcatcacatcggaggcctgccggacttttccgcgctgcgtttcacccgctacaaccagtacgagtcgatgattctgccgatggtcaagtatctggaatcgcacggcgtcgaattccgctacaacaccaaggtcgagaacgtggaattcgcgattggcgggggagccggccccaagcgcgagcacaccggcgtaggccaagacaccatccagaagattcaggccacctccggcttcttcaagcgcaaccctgccagcacgcccaccaagaagcttgccgtgcgcatcgacgtggaccacgagggtgataaatcctccatcgacctgaccgagaacgatctggtgttcatcaccaacggcggttgcgtggagaactccaccatgggttcccagaactcgcccgccgcatggaacccagacctgaagcccggtggcggctgggatatgtggaagcgtatcgccgaccaggacccgagctttggccatccggagaagttctgctccgatccgaatgccaccaagtggatgagcgccaccgtcaccaccctggacggcgagattccgccgtacatccagaagatctgcaagcgcgacccgttctccggcaaggtcgtcaccggcggcatcgtcaccgtgcaggactccaactggctcatgagttggaccctgaaccgccagcagcagttccgcgaccagcccaaggaccagctgtgcgtatgggtctacggcctgttcccggacaagcccggcaactatgtgaagaagccgatgaccgaatgcaccggtgaagagatttgcgaggagtggctttaccacatgggcgtgccgaccgacaagatcgaggcgctcgcaaagcaccacgccaacaccgtgccggtcatgatgccgtacatcaccgcgttcttcatgccgcgcgcggccggcgaccgcccggacgtggtgcccgatggtgccgtgaacttcgcattccttggccagttcgccgagaccccgcgtgacacgatcttcaccaccgagtactcgatgcgcaccggtatggaagctgtctacacgttgctcggcgtggaccgcggcgtgcctgaagtgtggggcagtgtctatgacgtgcgcaacctgctcaacgccaccgtcaaattgcgtgacggtgcaccggtcaccgatatgaagctcaacttcattgaaaaggccgtggtcaagaaggtgctcaagaaactcgacggcaccgatattgccaccctgttacgcgaataccacgtaatctgacatccatctggctcccctcgactggcacgcgaagcgtgactgagggaagttgctcacaacggagtgttaagagaaagacaaaaacatgactgattctgatccccagttaatccgccacgccaccatcgacgatctggacgcgctggccgccatggaatccgaatgcttcccggccgccgaggccgccgaccgctcgtccctgcgcgcccgaatcgagacctatccggaatgtttctggctattgattgatggcgagatcgtcatggcgttcatcaacggtttcgcgaccgatcggcgcgacttgaccgatgacatgtacgaggatgccgcgcagcacaaccctcaaggtgactggcaaatgattttcggcgtggatactgcgccgaagtatcagcatcgcggttgcgccagtacactcatgaggaaagtcattgaagacactcgtgcagctggacgtaaaggcctggtgctcacctgcaaagatcggctggtcggattctatgcgcaatttgggtatgaggacgagggcatttcggagtccactcacggtgacgtggtctggcatcagatgcgcctgaccttctaatcccactttggttcccctctttgatgctgaggcgtctaaaaaacagtccggtggactgttttttagacgaaggcgagacgatagtcgagccataaggacgagagctttttgcgggtgaaccgtccgcgtgatcggactgaggggagttgaacgtggaataaattgttgcgacacgccggtgaacatctgatttcgttacgtgagcccataaaaagccggcgtatcctgatggtaacggcgtgattcaagctgatttcgacacgccgagcgaagcctgtcgtttcaacgatttgggcttatcttcgtgcgcccgatttgcgcgagtccgtgaatgcgtgtaagttatttccttgctgccgctcagcgagtggttctcctccggggagctgcgaggtgggtgagtggtggtggtttgagaactcaagagcgtgtttgtactacttctttatagtcaatgattgccagttcattcctcgcctgattgcctgtcgtggtggttgggtacccgggagggtttgatgaggggtgaggttttttgagggcgtccttccttaaggacgtgctcgtcaatttttgttttgagagtcatctattcggatgcttttcatgaagtttttttgtggagggttcgattctggctcaggatgaacgctggcggcgtgcttaacacatgcaagtcgaacgggatccaccgggctttgcttggtggtgagagtggcgaacgggtgagtaatgcgtgaccgacctgccccatacaccggaatagctcctggaaacgggtggtaatgccggatgctccagttgatcgcatggtcttctgggaaagctttcgcggtatgggatggggtcgcgtcctatcagcttgacggcggggtaacggcccaccgtggcttcgacgggtagccggcctgagagggcgaccggccacattgggactgagatacggcccagactcctacgggaggcagcagtggggaatattgcacaatgggcgcaagcctgatgcagcgacgccgcgtgagggatggaggccttcgggttgtaaacctcttttatcggggagcaagcgagagtgagtttacccgttgaataagcaccggctaactacgtgccagcagccgcggtaatacgtagggtgcaagcgttatccggaattattgggcgtaaagggctcgtaggcggttcgtcgcgtccggtgtgaaagtccatcgcttaacggtggatccgcgccgggtacgggcgggcttgagtgcggtaggggagactggaattcccggtgtaacggtggaatgtgtagatatcgggaagaacaccaatggcgaaggcaggtctctgggccgttactgacgctgaggagcgaaagcgtggggagcgaacaggattagataccctggtagtccacgccgtaaacggtggatgctggatgtggggcccgttccacgggttccgtgtcggagctaacgcgttaagcatcccgcctggggagtacggccgcaaggctaaaactcaaagaaattgacgggggcccgcacaagcggcggagcatgcggattaattcgatgcaacgcgaagaaccttacctgggcttgacatgttcccgacggtcgtagagatacggcttcccttcggggcgggttcacaggtggtgcatggtcgtcgtcagctcgtgtcgtgagatgttgggttaagtcccgcaacgagcgcaaccctcgccccgtgttgccagcggattatgccgggaactcacgggggaccgccggggttaactcggaggaaggtggggatgacgtcagatcatcatgccccttacgtccagggcttcacgcatgctacaatggccggtacaacgggatgcgacgcggcgacgcggagcggatccctgaaaaccggtctcagttcggatcgcagtctgcaactcgactgcgtgaaggcggagtcgctagtaatcgcgaatcagcaacgtcgcggtgaatgcgttcccgggccttgtacacaccgcccgtcaagtcatgaaagtgggcagcacccgaagccggtggcctaaccccttgtgggatggagccgtctaaggtgaggctcgtgattgggactaagtcgtaacaaggtagccgtaccggaaggtgcggctggatcacctcctttctacggagaattcagtcggatgttcgtccgacggtgtgcgccccgcgcgtcgcatggtgcgatggcggcggggttgctggtgtggaagacgtcgttggctttgccctgccggtcgtgcggtgggtgccggggtggtatggatgcgcttttgggctcccggatcgccaccccaggctttttgcctggcgcgattcgatgcccgtcgtgcctgggggccggccgtgtgccggtgcgatggcgtggcggtgcgtggtggcttgagaactggatagtggacgcgagcaaaacaagagtttttgaatctttgttttgctgttgatttcgaatcgaactctattgttcgtttcgatcgttttgtgatcatttttagtgtgatgatttgtcgtctgggaatttgctagaggaatcttgcggccatgcactttcgtggtgtgtgttgcttgcaagggcgtatggtggatgccttggcagacaggaccgatgaaggacgtttgaggctgcgatatgcctcggggagccgccaacagggctttgatccgaggatttccgaatgggggaacccaccgaccgtcatgggtcggtaccggcttcggccggggggtacgcagggaagtgaaacatctcagtacctgcaggaaaggatattccgtgagtagtggcgagcgaaagcggatgatggccaaaccttgcgcgtgtgatacccgtcgggggttgcgcgcggggtgttgcgggatcgcgtgcgccggctccgacgggccggccggcagttgcagaaaaccatgtgtcaggggaaccgggttgaataccgggccgcagagggtgagggccccgtacctgaacgcgcatggtctgccgatcgcgtctcccaagtagcacgggtcccgtggaaccccgtgcgaatccgcccagaccgttgggtaagcctgaatattcctgtctgaccgatagcgaacgagtaccgtgagggaaaggtgaaaagtaccccgggaggggagtgaaacagtctctgaaaccgtgcgcctacaatccgtcggagcccttttgtggggtgacggcgtgcctatcgaaaaatgagtctgcgagtcagtggcatgtggcgagcataacccgtgtggggtatgcgtagcgaaggcgagtcttaaaaggcgtttgagtcgcgtgtcctggacccgaagcgggatgatctagccctgagcaggttgaagcgcgggtaagaccgcgtggaggaccgaacccacctgggttgaaaaccggggggatgacttggggctaggggtgaaaggccaatcaaattccgtgatagctggttctctccgaaatgcatttgggtgcagcgtcgggtcattacgtcccgggggtagagctactggatgcttgcgggcccgtatcgggtaccaacagcaaccaaactccgaataccggtgacgcgtatcccggcagtgagtcggcgggggataagcttcgtcgtcgaaagggaaacagcccagaccgtcgtctaaggtcccgaagcgtgtgctaagtgggaaaggatgtggagtcgcatagacagccaggaggttggctcagaagcagccacccttgaaagagtgcgtaacagctcactggtctagtggttccgcgccgacaatgtagcggggctcaagcacaccaccgaagacgcggcagtattttgtactgggtaggagagcgtcccatgaggggcgaagcggccgtgtgaacgcgccgtggacttcatgggagtgagaatgcagacatgagtagcgagagacgggtgaagatcccgtccgctggatgaccaagggttccagggccacgttcatcgtccctgggtgagtcgggtcctaaggcgaggccgacaggcgtagtcgaatggatgaacgggtcgatattcccgtaccggctttcagccgccaaaaccgaggcttggagtactaacctccgggtccgggcttactgctccttcgggggcgggatgccctggcctgttgggaccgatccttgtagtaggtcagcgcaggagtgacgcagaagggtagccggccgcggaggtggtcttccgtggtcaagcacgcagggcgtgggacaggcaaatccgtcccgcatgggtccgaggtgcgatgatgggggccttatggcccgatatccggtgatcccggctgccgagaaaagcttcggcgtcaggctcaaagccgcccgtaccccaaaccgacactggtggtcaggtagagaataccaaagcgatcgagcgaatcctggtcaaggaactcggcaaatcactcccgttccttcggtttaagggagacccccgatggtgaacacgcttgctgtgggagcttttgggggtggcacagaccagggggtagcgactgtttaccaaaaacacaggtgcatgcgaaggcgcaagccgctgtatatgcactgacgcctgcccggtgccggaaggttaagaggatccgtcagccttcgggtgaagcggtgaattcaagccccggtaaacggcggtggtaactataaccatcctaaggtagcgaaattccttgtcgggtaagttccgacctgcacgaatggcgtaacgacttccccactgtctcgaccaggagctcggcgaaattgcagtacgagtaaagatgctcgttaagcgcagaaggacgaaaagaccccgggacctttactataccttggtattggcattcggtgtggattgtgtagcataggcgggaggccgagaggcgcggtcgccagatcgcgcggagccgtaaggtgaaataccgctctgttcgcattggatgtctaacctcgaacagtcatcctgttcagggacagtgcctggcgggtagtttaactggggcggttgcctcccaaagagtaacggaggcgcccaaaggtccgctcagcccggttggcaatcgggtggcgagtgcaagtgcacaagcgggcttgactgcgaggacgacggtccgagcagggacgaaagtcgggactagtgatccggtgccggtgtacggacgcggcatcgctcaacggataaaaggtaccccggggataacaggctgatcattcccaagagtccatatcgacgggatggtttggcacctcgatgtcggctcgtcgcatcctggggctggagcaggtcccaagggttcggctgttcgccgattaaagcggcacgcgagctgggttcagaacgtcgtgagacagtttggtctctatcctctgcgctcgttggaatgctgaggaggcctgcccatagtacgagaggacctgggtggacgaacctctggtatgccggttgtcacgccagtggcacggccggttggctacgttcggaagggataaccgctgaaagcatctaagcgggaagcctgctccaagataagcattccgtggaaccttcgagttcctgtagtccccatgcagaacacgtggtcgataggccggacgtggaagccccgcgaggggtggagccgaccggtactaacggacgaaaggcaacaccaacattccaacccctggcggttggaccgcatcttcctcctgcaaacgacaccagacggcaatgagcattgtctggccacaagacgaaacatcgacatatccgcgtccgctgtccggttcccaggccgccacaggccggcagaccccagcgtctgaccgtataagagaagatttgcggcggccatggcccaggtgagacgcccggtcccattccgaacccggaagctaaggcctggcacggcgatggtactgcacccgacagggtgtgggagagtagcacgccgccgcaccacacgtacaggaagccccttggagcacacgccccaaggggctttccctatatccgaaaccaacaagacaagacaccgacaagacataggctctcgcacctagggtgtggccgaatcgaaagcatatagaagagggaaccctccaatgacggagagttccctctttgcgtatctggaccgataaaggtctagaaattgaaattgtccggatcagcaccgttgcgcttgccggtgttgatggcggagatggcggtcatatcatcgaccgataggttgaagtcgaagacctcgaagttctgcttgatgcgctcggcatgagtggacttgggaagcacgacgatgccgcgctggatgtgccaacgaatcactacctgtgcagcagacctgccgtacttggcaccgattccggccagtactgggttgctgagtaggttaccgccggtgccgccgagcggactccaagcttcagtgtgaatgcccttggcacgcagctggccaataagctcttgattggtgaattgtggggaagactcaacctggtctacagcaggcaccacatcgctatgggtcagtagctcatcgatatgatgcttttggaagttgctgacgccaatggccttggcacggccagaggcataaatctcctgcaagtcgtcccatgcctgctgccagccgtctgctggccagtgaatcagatacagatccacataatccacgcccaagcggtcgaggctttcttggaatgcatccttgccgcggcgtgcgcgaatatcgtcattccacagcttggtggtcaagaagaaatcgctgcgcggcacaccagcacggcgaataccttcacccactgaagcctcgttgtggtaaatcattgcggtatcgatatggcggtagccattctccagagccgtctgcaccgcgttcaccgtagtatcaccatccggtgtctggaatacgcccaagcccacctgcgggatgacagtgccgttgttcagcatgattgtcgattgaattgccataatgcctcactagtcgtagtattcgttcaatttcccattctagaaacaagacgatgcaataagccgcgttttgctggcaaagaatgattctttttttttcagcgctacgatgaacgatatgactacggaatatgtggctgcatttgatgcggggaccacggcgttgaagggtgccttagttaatgggcagggttgcattgtagctagtgcgagtagcgaacttgaccttattatcaacggcgactatcgggagcagagccccgatcaatggtggcaagctttctgctcggcctccaggcacatgattgagcaggcgcggcaatccgagtcagaattcaatgtgactcgcattcgtggcatcattttcagcggtcagatgcaggatgttattgttttgaacggcgagctcaatcccgtccgcaatgccattctgtattcggatggccgagccgaggaacaggccaagcaactcgccgagacatatcagggcggtgcagaacgtttcctgaacaccgttggtaaccggctcgaaggctgcttgccgttgcccaagttgatgtggctgcgtgaacacgagccggaaacgtacgcgcgcattcgtcatgtattgatcagttccaaggactacttgatcgcccaattaactggcgaatgcgtgggcgatgtggcggcgtgttccacagccggtgccatgaatatccgtaatggccagtgggatgccgaattatgcgaggtcgcagaaatcgacatgaccatattgccacacctgcacaatccgcaagacaacattggcacagtgacggaatccgctgcacaacgcaccggtttttccgccggaactgcggtatacgcgggcattggagacgcgggtgccaccacacttgccagcggtgtcagccaccctggtcaatacaacatcaatatcggcacctcaggctggatcgccaccgtttcgcccgagccgttcaccgacaagccaggtgctgcgaatctggcatttggcgtggaagaaggcttcgtgaatgccgtgccattcctcaacgccggcgacgtgcataaatgggttaccggcgtattctccgatggcgattacgcagaggcgcatcagcttatcgaaacatccaaacccggctccaacggtgtgctatgcctgccatatctggtgggggagcgattccctgttatgaatccgaatattcgcggtgcctatgtgggcctcgatccagacaccgccaaggcagacatgatgcgtgccgcgcttgagggtgtggccttctccattcgtcaaggtatggaaagttttgacgccaaacccaccgagatttccctgattggcggcggagccagagaaaatgcgtggtgccagattctggccgatgtgttggagcatcccatcgaagtgttcgccaatgccgatattctgccagcagtggcaatggcctcgttggtattcaatgtaccagacctgctgcaatcagtatgcgaatgcactgtataccagccgaatcctgacaccgcacgcacatatgccgacgcataccggcgattcctgagcctctacccaatgctgcgaacgatggattaggaactgagcatcatgaggcaatcggcgaatttggtccgcaaacatatagtggtcaacggactggtgcaaggcgtgggattccgttattttacggtgactcaggcacgtcggcttggtgtacggggttgggtgcgtaattgtcgcgatggctcggttgagctggaagcacaaggcagcagcgacgcagtgcaagccttggttgagcaattagccattggcccgcgatggtccgaagtgagtcacgtcgccgtgcatgacatgccgattatcgatgagaccgctcgggcatttggcgtgcgtcaataacctgtatcacgaacccacatcacgcacgataatctcacgatacgggtgaacatgggcgttcctcgccgcttaggcctcgcacattgctacgatggggcgttatgagtgagaacatcatgcgaatcattgacctgcgtggtcagaacctgtcccgtgccgaactgcttgccgcgatgccgcgtgctgcaatgggtacttccgaagccaccgatttggtgcgtccgattctggacgatgtcaaagaacgcggcgccgctgccctgcgcgacttcgaggagaagttcgatcacgtgcgtcccaagaacctgcgcgtgccggtcgaggcgatcaaggacgccctgaccacgctcgaccccgaagtgcgcgccgccatcgaggaatcggtgcgccgcgcccgcgccgtggccgccaaccaggtgccgaaggacttctacaccgacctcgccgaaggcgcccgcgtggccgaacgctggattccgattcagcgcgtcggcctgtatgtgcccggcggcaaggccgtctacccgagctccgtcatcatgaacgctgtgccggcccaggccgccggcgtcgaatcgctggccatcgccaccccgcccgcccgcgacaatgaggaaggcctgccgaacaagaccatcctcgccacctgcgccatcctcggtgttgacgaggtatacgcggtcggcggcgctcaggccattgccatgttcgcatacggcgccaagggcagcgagccgcaggacggcgacatcctgtgcgatccggttgacaagatcaccggcccgggcaacatcttcgtggccaccgccaagtcgctggtctccgcattcgtgggcattgacgcggttgccggccccaccgaaatcggcatcatcgccgacgaaaccgccaacccgagcctgctggccgccgacctcatcggccaggccgagcacgatgagctcgccggttccgtgctgttcaccgactccaccgagattgccgacaaggtgcaggagagcctcaagtaccgcgtgccgcgtaccgagcacgccgagcgtgtccacacgtcgctgtccggcacccagtctgccatcgtgctgaccgacggtctcgaccagtccatcgacgcggccaacgcctacgccgccgaacaccttgagattcagaccaaggatgccgatgcggtcgtcaagcgcatcaagaacgccggtgccatcttccgcggtccgtactccccggtgccgctgggcgactacatgtccggctccaaccacgtgctgcccaccggcggcaccgcccgcttcgccgcaggcctcggcgtgcacaccttcatgaagccggtcgaagtcatcgaatacgacgaggaaggcctcaaggccctcgccgcccgcatcaacgccttcgcggtatccgaggacctgcccgcccacggcgagtgcgtgctctcccgcttcgtcaaggatccgtatgacaaggccaccctgcgcgagcaggagaaggaagccggtctgcgatgagctcgattcctgcaaacctgccgctgcgcaacgacctgatcggtgaggagccgtacggcgctccccagctggacgtgccggtgtgcctgaacgtcaacgagaacccgtatgcgccggacccggccgtatgcgacaccatcgccaagcgtgtgcgtgaaatcgcccccacactcaaccgatacccggaccgtgagcacatcgaattgcgtcaggcattctccgattacctggcccgcgaatccggtacccgtctggacgtggacgagctgtggggtgccaacggctccaacgagatcatgctccagctgttccaggctttcggtggcccgggccgcaccgcactcggtgccgacccgacgtactccatgtacccggagtacgcccgcgacaccttcaccggttggaagctcgcccaccgcaacgccgacttcacgctgaacgtcgacaaggtgcttgaggccatcgccgaggtcaagccctcgatggtgctgctcactagcccaaacaacccgaccggcactccgttgccgatggaggatatcgaacgtattctcgccgcctgcgaaaccgctgaagtggtcggcgcgggcgagggcgtgcacccgattctcgtcatcgacgaagcgtacgtggaattccgcaagcccggcaccccgagcgccgtgagcctgatcaaggaccacccgaacttggccgtcagccgcaccatgagcaaggccttcgccttcgccggtgcgcgagtcggctacctggccgcgtccaagggcatcatcgactgcgtgcgtatcgtacgtatgccgtaccacctgtccgccgtgactcaggccgccgcactggccgccttcgaacacaccgacgagcagctgagccgtgtcgagcacctgcgcgaaacccgcgaggccaccgccgcatggctcaaggaacagacctacaaggaccagccgcttgaagtggccgaatccggctcgaacttcctgctgttcggcgggcacttcgacaagcgtgaagccatcttcgacgagctcctgaagcgcggcgtactcatccgcgtggtcggaccggacggttggctgcgcgtgtgcatgggcaccgacgaggagatggaaaccttccgtaacgcccttgttgaagtgcttcgtatagtggaagcagcataagggacgtttctttccgattgcggcgagacccgaagcgattcgagtcccgccgcaatccaatatgacgaatcacacaggagacatgatggcaagaaccgcgcacatcgtccgcgaaaccaccgaatcacacatcgacctcgaactgaacctcgacggcaccggcaaaaccgatatcgatacatccgtgccgttctacaaccatatgatgaccgcgctcggcaagcattcgctgatcgacctgaccatccacgcccacggcgacaccgacatcgacgtgcaccacactgtggaagatacggccatcgtgttcggcgaagctctgaagcaggctctcggcgacaagaaaggcatccgccgctttgccgacgccaccgtgccgctcgacgaggcgctggccaaggccgtggtcgacatttccggccgcccgtactgcgtgtgcagcggcgagcccgaaggctacgaattctgcatgattggcggccattttaccggctcgctggtccgccacgtcatggaatccatcgccttccacgccggcatctgcctgcacatgcaggtgctcgccggccgcgacccgcaccacatcgctgaagccgaattcaaggcgctggcccgtgcgctgcgcttcgccgtggaaatcgacccgcgtgtagacggcgtgcccagcaccaagggagccctgtgatgaccgacgacaagttcgatccggacgaatcgcacttctccgacgaggagcttgaggctgcgctcgccggattcgagaaagaattcgcggacgattcggtatccggcgatgccagtgataccagtgatgccgataaaacagcggacgctgcttcagcgaagtccgattccgacgcgaatgatgatacggctgataaggcttccgctgattccggccggcctatgaccgacgacgtcaccgggtccgttgcggatgcggtgaacgaggccatggccgacgtggtcgacccctcgctcggcttcgacaacgaactcgctggactgttgggtaacaaggcgaaggtggcgctgatcgttacccgtcttgcctccgccgaactgttggccgcgttctgccagctgtcggacatctccgccgcatgcatcggtgccaatcagggggccgtcgcggtgctgaagaatctggacggcgacggtccggaagccgcagccaaggacctgaccaccgtggtatccggcatggccgtgattcttgcagtcaatcgtgccgacaagctcgaagtggccatgtacgtgcagggagaggccggacagagtttcgcgccgcccgtgctgttcacctccacgccgcgcttcgtcgaggacctgatgctcggcatcgtaaccctgaaccaactcaagacccaagggttcgaagtggtggattccgctggactcgaccatgatcaggcgatgcagattctcgccaaccacactaggcgcggacgtggcgggcgcggctcccgcatcgaatagacgccaaccaaaccagtaggggataggagagcagatgaccacagcggttgttttcgattacggtttcggcaatgtacgttccatggtgcgtgcgctcgccaatcttggcgtcgacaccaccctcacctccgactaccggcagtcgttggaggccgacggcctagtcgtgccgggcgtgggtgcgttcgccgcatgtatggaaggactgaagaaggtcgacggcgaccgtgtgatctatgatcgcatccgcgctggccgcccggtgctcggcgtgtgcgtgggcgagcagatcatgttcgaacacggtctggagcacggtgcccatgccgcaggcatcggactgatcggcggttcggtgaacctgctggacgccgacgtggtgcctcacatgggatgggacacgatcgaggccgcccccgattcggtgctgctcaacggcgtggagaacgaacggttctacttcgtgcactcctacgccgcgatggaagtgaagccggcggatacgtcccgcttcgacatcgatctgagcgattcgcccgaacgcgtgagctggtgctcgtacggccgatcgcgctttgtggccgcctacgaacacggcccgctgtccgccacgcaattccacccggaaaagtccggggacgctggctcccagctcctcaagaactggatcgccacgctgtaaaaaagcatgaagctccctctgacgagggagctcaaattgtgtataagtaactgaagaaaggctcttcttatgtcgttgactctgctgcccgccgtcgatgtacgcgatggcaaggccgtgcgcctgcgccaaggcgaatccggttccgaaaccgattacggttcgccgttcgaggccgcccgtacttgggttgaggccggtgccgaatggattcacctggtcgaccttgatgccgctttcggtacgggcaacaatcgcgatcagctgcgagaaatcgttcatgagctcggcgaccgcgtgaacatcgaactgtccggcggcgtgcgcgatgacgcttcgttggacgcggcccttgaggccggtgccgcccgagtgaacatcggcaccgccgctttggagaatccggattggaccgcctcggtcatcaagaagtacggcgaccgcgtggctgttggtctggatgtgcgcggtcacacactggcggcgcgcggctggacgcgcgaaggcggcgacctgtttgagaccatgaagttccttgactccgtgggctgctcgcgttacgtggtaaccgacgtggctaaggacggcatgatgtccggcccgaacattcaattgctgagtgaagtcgctgaacgcaccgacgccaaggtcacggcttccggtggtatctccaagctggacgatttgcgcgccatcaaggaactggctgaaattggtgttgattctgccatcctcggcaagtccctctatgcacgtgcgttcacgctccaggaagcgcttgaagtagcgaagtaggcaaaggactcgccttagcgagactgttaatctaccttcgctcagctatcgcttcactcagacccctcctacggacagcccattgggctgtccgcttaacggctcagcaagggaggtcgccggatttgaggagctttttgaagacggcgtagtcttcatcattctgttcggcgtagctgacggcgaatgaggcgatggcctgatcgaattcgtcggtgccacccatgtaattggcgatcgcaatcgaatcgccggtgcgggcgtgggcgtgcgccaacgaccatgcgcacatgcgtgacagatcgctcaatcccgaagcgttgagattgtcgatatcaatcgaccccttgccattccacaactggcgcacgtaatagtcgcgcggtcggccatcctcggccataaagctcgaccaacccaacagcacatcggccgtattctgaatcagcttctgcccctgaaccacgcgctcaccgtgcgtggcgtacggcgacgcgccgcagtaatgctcgagcacggaatacgtggcttccttcatctgaatcatcatcggatcgtcgatatcacgcgcgatccacaccgacgtccacgcgcgctggcccaccgagcccacgcccaccaccttgcgggccgcgtcctgatagcgcaaatgatcgaacacccaacggcgatcgtcgtacagggaatgccggtagctctcgaacagcgtgtctatacgtgcctgcaacgcatccaagtcggcgtaatcatccagctgattgatcggcaccagctcgggcggattggatttgaacctgagcttgccgctctcataacggcacagtttggccgccgccgcgtcgttatccttcagcagcgccttcatggccgcctcgcgcagcacacggctgcgtttggaaccggtggtctcgaagcggtcgagcgtctcctccacgtctaggtgctcgtaccacgcgtcaaggtaatccatttcggagaaccacttcatgcgtgtgcggtacgtgtgtacgcactggaccacggcggcgcgacggtccttctccttgattttgttggcgcgtccgcagatctccaccgaggcggcgagacgcttcagatcccattcccacgggccgatagcggtttcgtcgaaatcattgatatcgaacaccagacgggcggaaggggagcggaaaatgccgaaattgccgatatgcgcgtcgcccacgcactgcaccggaatgccagtgactggcgtggaagccaggtcattggtcatgatgagcacggtgccccggtagaaggtgaaggggctggcgctcatacgcttgtaacgcagcggaatcagatccggtacgcgaatcgcggactgctcctccaaaaggctgatcgcctcacgccggccctccttgaccttccagatggcatgtgcgtccagcggcgccttggtacgagtggcgatgccggcgcgcgaacggtcgcgcgggtcggtggcctgcgtccagctggtcacgtcgacgggcggattggcggatggggtgagatgatcttcgctcatagtcactaccatagtgccgtgccggcatgggcccgaaccatgcctgacatgcggaccggggcatgttgatgaaatctcgcgactcgcaggtgacgaacagtgagatgttaacgcccctcgtaacacggttatggaacgataggcgactatggataaacagcaggagtttgcgctgcgcacggtcgaagaacgcgacgtgcgctttattcgtctgtggttcacggacgtgttgggaacactgaagtccgtggcgattgctccggccgaactggaagccgcgtttgaggagggtctcggcttcgacggttccgccatcgagggcatgacccgcgtgtccgaagacgacatgatcgttcaacccgatccctcgacgttccaaatcctgccgtggcgcggtggcccgcaaggtaccgcccgcatgttctgcgacattctgaccccggacggcgagccttcgctcggcgatccacgtcacgtgttgaagcgcacgctcgccaaagccaaggacaagggcttcacgttctacgtgcatccggaaatcgagttctacctgttcgaaagccaggacgactggtccaaggccccgaccccgatcgacgagggcggctacttcgaccacgtgccgcgcagcccaggcatggacttccgccgcgccaccgtgaacatgctcgagcaaatgggcatctcggtggaatactcgcaccatgaggcggggccaggccagaacgagatcgatctgcgatacgcggacgcgctcaccatggccgacaacatcatgacattccgtacggtggtcaaggagatttccttggagcgtggcattcacgccagcttcatgcccaagcccctggccgacgcgcccggttccggcatgcacacgcacctgagcctgttcgaaggcgattccaacgccttctacgaggccggtcaggagttcaacatgtccctgaccgcccgccagttcgccgccggcatcctgtaccatgcggccgaaatctgcgcggtcaccgaccagtacgtcaactcgtacaagcgcctgtggggcggtaacgaggcaccaagctacatctgctggggccacaacaaccgttccgcgctgctgcgtatcccgcagtacaagccgggcaagggcaactccgcgcgcatggagttccgtgcgctcgacccggtggccaacccataccttgcctactcggtgctgctggccgccggtctcgatggcatcgataagcagatgcagttgggcgagcctaccagtgatgacgtgtgggagctcaccgacggcgaacgtcaggctatgggtattcagccgctgccgcgctcgctggacgaggcgctgaagatcatggagaaatccgatttcgtggccgacgtgctcggcgaacacgccttcggctacttcctggacaacaagcaccaggaatgggaggagtacaaccagcaggtcacgccttacgagctgaagaagtatctgccgaagctgtaatcgcaagcgttgcacatgtgccgaaccccgtcgatgattggtcatcggcggggttttctatggcgtgtcgtggtggtgggtagtgggcagaggtgggaataacgttgtcgctgagttgatacgaaaaaacgattgacgtaaccgacgaatcagcttgtagtacgagcgagagcactcaagagagcacccatgacgaacgcacctgcgaataccgcgcgtaccggccggcacttgggtggccgatacctttggttggcgtgtcacctttgccttggtttcggtgctcaccgccgtgctgatggcatcgatggcagtgtctctgccacgcaactcgcatccggcgaagatcggtttcctgaggcaattccgcctgttcttcgaccgccgcatccagctcggcgtggcggatgtggtcttcggcgcagccgcctcctatgtcttctacacgtatctttcgccgatcatgcgcgacgaaatcggcgtgcccgaacgctatatcagcatcggcttggtgatttacggctgcgcctgcctgtggagcaacctgtacggcggcaagctggcggacaaaggtcatggcgtggaaccattgacccacattcgaccgatctactgcgtgcaggccgtctgcctgtgtctgctggctttcgcctcgctgctggcggttggcgccacgaccctgctgcgtccatacgtcgaacgctgacagtgttggccgagtccaatcggacaagaccggtcagctgccgttatcagcttcgcggcgaaccgaaccagctggtgtagataagcgcgaagttgcggttgccataactggagcaggaatcgccggtaccgttgccggcggccagtgcggcgatgttcggctggtagggcgtatagatgtagagcagggcggtcgccttgttttcgatatacacttgcgcgccgccgcatgccgcgttcggatgatattggatgtagttgagactgtgcgccgtgtatccgtactgttcctcgtgctcgagatagtaacggtaccgcttggccgcgccatacacctgccgaaagaatccggcataggtgggatcgcagtcggcggtatccggacagttcagccccatcgccgccatgagctggtagttgctgagatcgacggcagtgaccagatgctgctccttctgcatcacggtgagcagcactttctggctcactttgcaggcgtgggccgactggtcgatgattgccgccgccgactcgcctttggtgcctgtatagtccgcgcacaggccttcgcctgactcgttcgatgtgtcgaaggtcatcgcggccagcgagccaccttgtgtgtccaaaaacgattggacttcggcctgactcatcgccgaaccgttgaagaactgaccatccgaaataatattgcccggattgaaatcgtatgttcgcgtcagttccagctgtgccgcctcggctgcgcgaacctgtgcccgccagtttgtgaaacgaaccagcccggccaccagcgctacgacaacgaccaccgccaccgtgggaatcagcaccatcttgatacgggtcggccagttcgccttacgccaggaacgcttcagagcattgatcggaccgtgcctacgattgcgtttcctgttccgattgccgaggcgtccgcgcacttgcccacgctgtgatgacggcttgcgcgtgcgctggcgcgtggcctggcgacttgtttgccgtccggtcacgccagcgctttcttgatacggttgagcgaagccggccccttggtgccaagctcctgcgcccatagggacacgtagaactcttcaagcatccaacgggcctgttcggcctgcttcatcaatgcctcatgcttcgggccggccggctccgccttggcacgggccaacgccttatcaaccacctgacgggcctcgtcggcctgccaagcccacttgacatcacggttcttatcggttttcgccttattgagtcggctcagatcggctctcaaatatcggctcaacgacttcagcgcatccgggggagtgcgcccgatgaatccggggtagacgagcgtggcgatatggtcgcgaatcgactgcaacaccgaaagcatcggcagatcagccttgccgccagtggccttgtcgacctcggcataagccttgagcacggcgatcacgtcatgcgccacctgatagacggtgtcctcgtacacttcgcgcacatcgagcaccgcattggctaacgcctcatcgtccgagagcctgtcgacattcggcatcagccgtttgaccgtggccagctgcaggtcttcgaccagatccttggtggacttgtacggagcagaagccagcatcaacgcctcggtacccagccagcgcgacgaaatgcgttcggccggcaaccgcagcgcatccaatgcgccacgccagagcatcgtggcccgggactcggtggtggcacccgccttatgcaacaggttcgcctgactgaccagcttgccctgttctccagcctgatcggcctgcttcttgaccatttgacgggccgacgcctccgcctgcgcggcgaacttgcgttgcagcgccttcagatccttggacacacccagcaccttgatggggccgcgcgcatgccggcgtccacgagggtgcttgccggccggcagttgctgctccaccgagaacgtgaccctgagatacggggaaagacgctcgaccagttccggccccaacacttcgggatgaatctgcgcacccttggtggcgatggccgccttggtgaacacatgtgccagatcgggccagccaacggtcgtgccatcctcatccaccggcggcagattcggcttctgctgcgagcccgagcccggcagatccgggtaatgctcgtcgatccagtcacgaatcgcacgcgcggcatccggggccggcacgaactggacgcgcagctgcttgggcagcgccttgatcatcgacaggatcagctcatccaacagacccggcacattccatgtgaactggtcgggcgtgatacgcgagagcgccttcaacggcacatgcacggtgacgccgtcggccgggtcggccggatcgtacacgtagctcagacgcaggtcgatgggttggccgtccgatccggtcgtatgccaatggtcggggtaatcgtccaggctcaccgaatcgctggatgccagacgctccaccttggccgggtcgaaatcaagcagattcggctggcggtcatgctcggacttccaccatttcgccagatcggccacgctggtcacatcgttgggaatgaccgcgttgtagaaatcgaacagatcctcgtcggacacggtatccgccagctggcgggtgcggctcgcatcatcggcggcatcctcgagaatgtcgcggtttttgcccacgaagtcgtcgtaactgaaacgctgctgaatatcgccctcgaccagaccctggcgaatcaggaagtcgcgcgcctcaagtggattgatgcgtccccactgcacggcacggtcctgtacgatcggcagaccatacagcagcacgcgcgcggtggccacagccgagccacgcgaacccgaccagtgcggctccgcatacgtggtgcgggtcaattggccggccaacggttcggcccacgcggggtcgatggccgccgaatagcgggcccacaggcgagaggtttccaccagttcggtgctcatcacccatgacggggtcttcttggccacggcggaagcggggaacagggcgaaacgggtgccgcgtgcgccctgataatcgttcttcgactgcttctgggcgcgtttcatcgcacgggcgcgcgccgaaccggtcagccccgcgaaatcggaggccttgggctcgcgcaccacctgcatgcccatcatcgacagcaatccggcgagcatcgacttgtggatgccatccgcatcccacgcgcagcacagcgaatgcgcggcctgctgattcaacggcagctggcggatttccaagcctgggcgggaggtgggcagcgggtcgccgaccttgaacttcagctccttgcacatctggcgtagctgggagacgagatctttccactggcgcatcctcagccagctgaaatactcggttttgcagatacggcgcagcgcgttgttgctcggatcgccgtctgcttggaacacgcgatcccagatattcagggccgtcaggaagtcggaggtctcatccgcataccggttgtggatgcggtcggcatcctcacgcttgtcgtccgggcgttcacgtgggtcctgcaagctcaggaacgccacgaccacgagcacctgggccagaagattcggcgaaccggttttcgcggcctcgataaccatacgtcccagacgcacgtcgatggggatgcgcgccagctgacggccggtatgggtgagcgtcacctcgccgcgcttgcggccgatggccttgagctcggtgagctcattgaaaccgtccgacacggccttcatatccggcggatcgatgaacccgaagttcgtgacgtcctcggccgtgcgggccacgcccaccgacagcatgtggagtaccacggcacccagcgaggtacgcaggatttccggctcggtgaagcgcggtcgggtctcgtaatcctcacgcgaatacaggcggatcgcgataccgtcggccacgcggccgcatcggccggacctctggtcggcactggcctggctgatcggctcgatcggcagacgctggacctttgcggtcttcgaataccgggagatacgggcggaaccggggtccaccacataccggataccgggcacggtcagcgaggtctcagccacattggtggcaatgacgatgcgctggtgaaggtgcgattcaaacaccttatgctggtcggcggcggacagtcgcgcgaacagcggcatgatctcgatggcatccggccggcgcatgtcgtcggcgcgcgggccgtaatgatgccgcagtgcggcctcgaactcgtggatgtcgcgctcgccggaggcgaagaccagaatatcgcggggaccgcgctcgtgggaggagtgaatcaccagctcggcgcaggctcgagccacggcggtaggcatatcggtgatgccgtcatcggcataggaggcaccggaccggccgcggggccggtcggaatcggattccgcgatggcgctggccagctcgtcgtaatcggcgtcgccggggcgggcgcccaccgcgaatcccggcacttcgcgcatcaacgcgggcgcggtgccaagcggctcgtagaccacctgcacggggaaggtgcggccggaaacctcgattaccggcaccttctcatgcaaggcgtgctcgaaatgctcctggaacttgaccgaatcgatggtcgcggaggtaatgatgagcttcagatcgcggcgctgaggcagcagtgccgtcagatagccgagcagaaagtcgatgttaagactgcgctcatgcgcctcgtcgatgatgatcgtatcgtatcgggtgagtttcggatcgcgctggatctgggcgagcagaataccgtcggtcacgaccctcaatcgtgtgctgggcgagctttcgtcggtgaaacgcacctgatagccgacctcgtcaccgagcttcacgcccatctccgaggcgatacgttcggccaccgtgcgtgcggcgatacggcgaggctgggtgtgcacgatctgcttgccgtgcgtgccacggccaagctcaagcaggattttcggcagctgtgtggttttgcccgaaccggtctggccggacacaataacgacttgggaacgtttgaccgcgctggctatctcatcacgcgcggcagatacgggaagttctgcgggatactcatatttcatgacgaacttcaatgatacggaagcccttggagctcgcgtatttgctcgcagtgaacccctcgccgagcgcatcgtccagccaggggatcagcgaatcggaaccgagattcttctgcactacgagataggcggcaccgcccaccttgagcttcggcagccaagccataagcaatgtatgcagcgcttccttgccgactcggatcggtgggttcgaccaaatcacatcaaacgtgaggtcgctcggcaccgtctcgcagaacgccggctggttctcggcaggcaggggagtgctggactcgtccacctgagccgtatgaatgttcgtgtggccgttcgcctgtgcgttggcatgggtcaggtccagcgcgcgctcgttgacatccaccgcccacacgttcgcttcgggcgactcaaacgccaatgtcagggcgatagggccccagccgcagcccaaatccagaaaatcaccggtaagcggcggctcgggcgcatgcttcagcaataccgacgtaccgaggtccacgcgcgagccggagaacacgccgttcgacacctgagcggtcgcctcatggccgcgcaacgttacgttcaatgtgcggcgcacatccttcgatgcgggttccgcagagaaatactgttctgccatggtcgctccatttctgcgggattcgccgctctcgtatgccgacctgtatcagccggcctatgccggtacgtgccgatctatgccagcatgtcacctcatgtgatgataataaaggaccatagaagaatcgtgaaccattccaaccaaacgaggcgcacttgaccgacaacacccagtacaccgacatcaaccgcggcaacaacgacgttacccctgaaggtgtgctggccgagcagtccgaagtgctgctcgacgacagccagcgcgcgaccggctggcatgaggacgccaaccaggaatgggaggagcgcgaggcccgcaacgagctcaagcatgtcgccggtctcggcgagctgcaggacgtcaccgaagtcgaataccgcaaggtgcgtctggaacgtgtggtgctcgtcggcgtctggtcgtccgccgtcaccacgcaagccaaggccgaggaatcattgagagagttggcggcgctcgccgaaaccgccggtgcggtggtatgcgatggtttgctgcagcatcgctccaagccggatgcagccacgtacgttggttccggcaaagccaaggagattgccgacatcgtggcgcgtgaggaagccgatacgattatcgtggacgacgacctgccgccgtcacagcgccgtgcattggaggacgccgccaaagtcaaggtggtggatcgcaccgcggtgattctggacatcttcgcccagcacgccacctcgcgtgaaggtaaggcgcaggtggagttggcgcagctcgaatacatgctgccccgactgcgtggttggggtggttcgctgtcccgtcaggccggcggtcgcgcggccggcgcggatgcgggcatcggatcgcgaggcccgggcgagaccaaaatcgaaatggaccgtcgtgtaattcgcacgcgtatcgccagactgcgccgtcagattcgtgagatggccccggcacgtgaggtcaagcgcggttcacgccgtcgcttcggcctgcccacagtggccgtggtcggctacacgaacgccggcaaatcctcgttgaccaaccgtctgaccggttcggccgaactggtggaaaacgcgctgttcgccacattggacacggccgtgcgccgcgccaaaacccgcgacggacgcgcttacgcttacgtggacacggtcggcttcgtgcgccgcctgcccacccagctggtcgaggcgttcaaatccaccctggaagaggtggccgaggccgacgtgatcctgcatgtggtcgatggctcccaccctgacccgttctctcaggtcgacgcggtcaatgacgtgttggcggacatcgaaggcacggcctcgattccgcgtattctcgtattcaacaaggccgatcaggcggacgaggcgactcgtgaacgactcgccgcgctgcagccagatgcgttcatcgtctccgcctataccggtgagggattggacgagctgcgtaccgcggtcgaaagtctgctgccggtcccgcatgtgcatgtcaacgctctgttgccgtataccgctggctccctgatctctcgtgtacgcgaatacggcaaggtagacaaggtggagtaccgcgatgatggcatacagcttgaagcggatgttgacgcccatcttgccgctcaggtggtcgaacagtccattgactaacgtgataaacatcacagtatattcgtgagcgctaacaaccgttgaaaacattaccatacggttatcaaacagggtggtgtgctggtagtaaaacgtcttagcgggtttatagagtgaagacgttagttacaaggcctgccattcatcagcagaccgcctttgaagagaggttcatccatcatggcggaaactaccgttaagcccacgaagcttgctgttattggtgccggtgccgttggctccaccctcgccttcgccgctgcccagcgtggcatcgctcgcgagattgtgcttgaagacatcgccaaggagcgcgtggaagccgaagtgctcgacatgcagcatggctccagcttctacccgaccgtgtccatcgacggttccgacgatcctgagatctgccgcgacgccgacatggtcgtcatcaccgctggtccgcgtcagaagccgggtcagtctcgtcttgagctcgttggcgctaccgtcaacatcctcaaggccatcatgccgaacttggtcaaggtggctccgaacgccatctacatgctcatcaccaacccggtcgacatcgctacccacgtggctcagaagctcaccggtctgcccgagaaccagatcttcggttccggcaccaacctggactccgctcgtctgcgcttcctgattgcccagcagaccggcgtcaacgtcaagaacgtgcacgcctacatcgccggcgagcacggcgactccgaagtcccgctgtgggagtccgccaccatcggtggcgtccccatgtgcgactggaccccgctgcccggccacgatccgctcgacgccgacaagcgcgaggagatccaccaggaagtcaagaacgccgcttacaagatcatcaacggtaagggtgccaccaactacgccatcggcatgtccggcgtcgacatcatcgaagccgtcctgcacgacaccaaccgcatcctgcccgtgagctccatgctcaaggacttccacggcatctccgacatctgcatgtccgtgccgaccctcctcaaccgtcagggcgtcaacaacaccatcaacaccccggtctccgacaaggagctcgccgctctgaagcgctctgccgagacgctgaaggaaaccgccgcccagttcggcttctgataaaaaatcgctgtacggagcgcctttcgcaccgcacaagactcgacctacctttgtaggccttcaacttgtgcggcacgaaaatcgcacacatacagcgattttttataccctgccgaatgctcccattgggagcattttttattcgtggagttcgttggaggagggggagctatagccctcgggctcgagctggaaggtggtgtgggggaccgagaccgggaagtgctcgcgcaggcaatcctgcagttgggtgaggattgtggcggcatcttccatggtgaggtctttgtcaactaccacgtgggccatcagaatcggcatgccggtggacaccgtgctggcgtggaggtcatgcacggcaagcacatgcggcacgtcttccagatgttcgcgtaccttatcgaggtcaagtccatccggtgtttcctccagcagcaccttgaccgcgttgtgcagcaacttgatggcgcgcggaatcatcatcagtgcgatgacggcaccggccacggcgtcgaagccattccatccggtggagatcattaccagggcagaggccaccacggccaccgagccaagtgcgtcattcatcacctcgaggaacgcggccttcatattcatgttgtcttcgcgctgcgaggcaaggatgaaaatcgagatgatatttgcggcaagacccagaatgcccacgaacagcagcaagccgatatcgtcgatttccgctttggaaccgccgaacagacgcatgccggcctccatcaacgcatagatgccaacgacgagcagcaccacggcacctgcggcagcggtgagcacctcaagcctggcccagccccaagtacgagtgttgctgggcttgcggcgcatcagtatggcggtgattgtggatgccgccagcacggacatgtcggtgagcatatgaccggcatccaccagcagggccaatgagccggttaagacagccgacaccatttcgatgaggaagaccgaaccggttacggtcaacgtggcaatcagcctacgctggtgcgcggcagggtttatggatgtggatggtgcgggtgcatgggtatgagccatatgtactccttcgctctatcgagttgaaaccgcttctcaataccatttgcgatatggtctgaatacgacgaaaccccggcgcgaggccggggttccgtaagctgtgcgtgactatagcacgaccggcgcgattcggtgcacgctgatcagctggtggcgaacaggctacaatttgcgcagcacggtgaccaccttgcccataatcgtggcatgtgtgccgtcgatgggcgagtatgcggggttgtgcggcatcagccagacatggccgttttccttgcggaaggtcttcaccgtggcctcgtcatccagcagagcggcgacgatatctccgttgacggcggaattctgttcgcgcaccaccacatagtcgccatcgcagatagcggcatccaccatggaatcgccgtggacttccagcatgaacagggtgccggagccggtcagccgttccggcagacgcatgacgtcgtccacatgctgttcggcggtaattggcacgccggcggcaatacggccaacgagcggcacatcgtgtgattcggcaatggcttcggcggggaattggtatatctccgccacattactggtgctggttgcctcttcgctggcttgggagggcttttcggcattcggggcggatcctgccaccacctcgatggctcgacccttgttcgcgttcatgcggatgaagcccttgtcttccaaaacttgtagctgatgcttgaccgaagacggacttttgagcccggcggcatttccgatttcccggaaagagggagcgaagccttgttcgtcgatatgcgtgcgaatggcgtccaacactttgcgctggcggtcggtcagggtggactcgtccggcttctgcttgggggagaagggaatggtgctcacgtcagggctcctttcgttatgtcaccagcataacgtgttgttcgtgtgaaatcaaacatctgttcgagtttcgacttgaccgtgtcgaacgtttgtgccattataagaacagttgttcgatagaacatctgttcgagagaggtggtcgtgatgactggttcaatggtgatggccccggcccgtagcgcacgtgtagctatgcagcatgctggaacgtcccgccggaatgcgcgtgggaagattatcgcagtgatggtcgccttggcgctggcctggtgtggtttcggcgcgcttaccgttcagcgggcccaatcggatacgggggccacgcaggtgaccggttatatcgtgcggccgggggatacgctctggtcatatgcttcggctatcacgcctgctggtcatgatgtatcggaaacggtggatgagctgattgcgttgaacaatcttgagtccggatcattgcaggccgggcagcgcattattgttccggttgagtaaatgaaacccgagcggcatggtttttccgcccgtacacgttattctggggagcatgcattgtcctttttgccagaaccccgacaccaaagtcattgatacgcgcattagcgatgacggtcattccatccgtcggcgtcgcgtatgcccgaaatgcagcaagcgttttaccacggtggaaaccagtatgctgctggtcactaaacgttcgggtggcgtggagccattcagtagagacaaagtgatttccggcgtacgcaaagcttgtcaggggcggccggtcagagaagaggatctgaagctgctgggacagaaagtcgaagaggatcttcgctcccgaggccttgccgaagtcacctcagatgaagtgggcaaagccatcctgaaaccgttgcgtgacttggatgtggtggcgtaccttcgattcgcgagtgtgtaccagaactttgcaggtctggaggatttccaaagcgccattgatggtttgcgtgaataatatgcgaatgccatgcaccgtgatatgcgagtgattcgcaaaccatggtgcgagccaatcatgaagcccagcacttatgaaaaagacccgtcatgatgacgggtctctttcatatcaatcgaggatgagctgcgtcagctgatgacacgcatgcgaatggtgccttcgatgttgcgcagtgcttcaagcgtggcggcgctgggcttctgagccacgtcggtgaccacatagccaagttcgccttcggttgccagcgactggaaggaaacgttgatgttctcctcgccgagcacatgattgacatgagccagcacaccaggaagattgtcgtgcagatgggcgatacggcacacacccttgcactcaccgaggttgatctgcggtaggttcacggacaaggaggtagaacccttgaaccagtaatcctcaagacgctgagagacgaaatggccgatggattcctgagcttccaaggtggagccgccaatatgaggagtcagaatcatattgtcttcattggccagtgaggtctcgaacggatctccgctcttcttcggttcaacggggaacacgtcgaccgccgcgccagacagatggccggaatcgaggtgctgcttcagagctcccagatcggcgacgaaaccgcgcgaaaggttaatgaaaatcgcgtcctgcttcatgtgggcgaattggtcttcgccgaagaatccggtgttcgacttgcggccatccacgtgcagggtcacggcatcggactgttccagcagttcgttgagggtgtcgcaacggtaggcgttgcccagtgccagtttctcctcaatgtcgtagaacaccacgcgcatgccgagggcctcggccagtaccgacagctgggagccgatgttgccgtagccgatgatgccgagggtcttgcctcgcacttcatgcgagccggaagcggacttgtcccacaggccatgcttgatgtgatgcgtgtgtgcgggaatgcggcgcatcaagcagatgatgtcgcagatcaccaattccaccacggaacgggtgttggagtagggagcgttgaacacggcgatgccacgcttgccggcatgtgccagatcgacctgattggtgccgatgcagaagcagccgatggcgcttagcgtaggacgcgcatccagcacgcgggctgtaacgttggtcttggagcgtacgcccaccaagtccacgccatccagcgcatcgatgagttcgtcctcgctcagggctcctttcatggtctcgacttcgaaaccgtgatcacgcagcgatttggccgcatcggggtgaatgttttccaataacagtgctttgggcatgcttcataccttagatgttcagggacttttcgtccgcttttgtccgaactataaccagtttctgggtcggcctggtcattgccacgtacaggtccgaggcggcgaccaggcggctcggcgcgtcatcctcgatgagaccgggctcgaccaccacgacggcatcgaactccagacccttgaccgtttcagtgccgcagacgctgatttgctcatcccattcgggctgctcgatgagccttgcgtattcggccgggtcaagaatgacagccagtttgcggcgcacggcatcgcgcaccggggcgatgagattatccggacagatgacggcgatgcggccggtgccgtctgccgaaacgaattgttcggcaagctgcgccgcctgctcggccgtcgtttccagcaaggacgacatgtcgggcaccacattacgggacaccgaatcggggatggtgcgcaccgcattgaccgtggagatgtagaggccttcctcctcggcaaatcgtgaggcaagttcggaaacttcctgaggattacggtagttgatggtcaactcgttcaaatcccagtggctttcgccgaacaggcggttcatcgatttgctccagcgtcgggtgccacccagcgccgaagtctgcgccacatcgcccacgatggtgaacgagcgggaggggcaacggcggatcaacatacgccagtccatgtcggtcaattcctgcgcttcatcgaccacgatgtgcccgtaggtccattcacggtcggccgcggcccgctgcgcggtcagctcagcgtcgtccccgttcatctggtcgagcagcatctgactggagacgatgcctccacccagaccggtcgcggccagagtgtctttggcatactgctcttcggcggcacgacgtgcgtcggcggcggactggcgggccaccgccttgggatcggggcccagcatatccattgcttcgtcgagcagcggaatatcggagcgggtcaatggggagcctttgggacgggcaagtgccgcgatgtcgttgtcggtcagccaaccagccagagacttcagacgttcgggatgggcgaacagctgatcgatgagccatggggcggtcatcggcagccagcacaggttcagggtcttgcgaacctgctcgttcatacgtagcagcgacatcgcgcggttcagctccgcctgatccggcgtgtaatcaagctgttcggcataacggttctgcatgctggtcagcatcgaacggataaaagtctcgcgggccttgttatgaggttgtcgggtgcgcttcgcgtccgcctgcgcctgctcgatatcagtggccagcattggtacctgaatgccgctaatggttactgtcggcagagcagcgggaacacgcacgcgtgcggcgatggcattggccactacggaggtcatgcgtcgatcgcccttgagcttggctgcataaggggagtcgaccgccgtggcggtgatgccgggaatcagatcgctgatggtgcgtgagaccacgccggtctcgcccaaggaaggtagcacctgatcgatgtagtgcaggaacgccgagctggggccaacaaccagcacgccggaacgttccagcgtgcgccggtgcgtgtacagcaggtaggcggcgcgatggagcgccacggccgtcttgccggtgccggggccgccctgcaccaccacggcgcgattcatgtcggagcggatgatgcggtcctgctcggcctgaatggtggccacgatatcggtcatcttgccggtgcggcgtgagctcaacgaagccagcagcgcaccctcgccggtcaatgtgccggcggaagacgcctggccgacctggtctgaatgcacgtcgagcacctcatcctcaacgcccacgacttcgcggaaactcaaggtgatatgcctgcgcatcacgatgtcgccgtgattggaaggggtcgcctcatagaaaggacgtgcggcttcggcacgccagtcggtcagaatcggctcatggtccgggctcgacaggccgatgcggccgatgtaatgacggtcgccgttcttggcatcgaggcggccaaacaccagccgatcctcaacgctgcgcaattgcgtgaggcgattttcgtacattgtggcaaaggagtctcgttcgctgcgttgcgtgggggatccgtgggagccggcggcgcgtacggtgtccaggcgttgccacatttcggctcgcagatcatccaatcgtccataggcgcgatcgacggcctgctgctcttcatgcagctgggaggcgtaactcgacatgctgttctcttcgttccatttccgtggggcagaaaaacttaaggcattcaaatttaccgcacaccccctacgtcagtgatgcggacaacccggaataggtgaattcagcgtgaattcaccatgctgctcggtcggtggggtgcgcgacgtggattggatgtgcggagcgtccattcgtgcgacagtcgtggccgacacgcgcaatccatcggtaattgccctaaaagggtgagcaaatcgtgcatgagtggggagaaatggggaatcgtggggtagagtggtgagccagttggccgaagtgtatcccacgtaacgatgaaggaggtggagccatggttgccgatcagacgattcgcgacgctgatgccaacgcacaaggctccaccactatggccgatctcatggctggtctgccgccattgcttctcggcacatatacgccgaagatcgatgccaagggccgtatagcgcttccggccaaattccgctcccagctggggcagggcctggtcatggcccgaggccaggaacggtgcgtgtacctgctgccgttcgacgaatttcgacgtatcgcctcgcagattcagcgtgtgtcggtgggaaacaaagccgcccgcgaatacctgcgtgtgttcctttccggtgccgtcgaccagcagccggacaagcagggccgcgtgctggtgccgcagatgctgcgcgattacgccaatctgggttccgacgtcgtggtgatcggcgttggcacccgtgccgaactgtggaataaggacacgtgggagtcctacctcgccgagaaggaagagggatattccgatattgctgacgatgtgttgccggaggtggaattctgatggttgatgtggcgaatattcatctgccggtattgcttgacgattgcgtgaacctgatggcacctgccctggaacatgagaacgccatcgcagtggattgcaccctgggccttgccggccattccatcgccttcctcaaggccgcgcctcaggctcggctcatcggcattgaccgtgacagtgaagcgctggggctggccaccgaacgtatggaacgggaggggctcgccgatcgattcattccggtgcatgccgccttcgatcagctcgatcaggtgttggcggaccaagacatcgaacgcgtggacgccgtattcatggatctgggattatccagcctgcagatcgacgaaaccgatcgtggcttctcctattcgcatgatgcgccgctggatatgcgcatggacgtcagccagccgttgacggccgaacggattcttgccacctatgatgcggcggaactggtccgcatattcaaggaatacggtgaagagcgtttctcgcgtcagatcgcccgcgccatcgtggcgcgtcgagacaaggagccgtttaccaccaccgcacagctcaaccgtctggtcgatgaagtggtgccgcaagcccaccgcccggcgggcaatcccgccaaacgcgtcttccaggcgttgcgcattgaagtcaacggcgaattggacaagctcgcctccacattgccgcaggccgcgaaccgactgcatgtcgggggacgactggtggtggagtcctatcattcgctcgaagacaaaaccgtcaaatcgttcatggcacaagggctgcgagtggatgttccggctggcctgcctgtcataccgccggatgcccaaccgtttttcacggatctcacgcgaggtgccatcaaggccgacgaacatgaaatcgcagccaacccgagatcggcttcggtgcggttgcgggcggtggaagtcagccgtgagattccgtcacgatggaggaaacgctttacgcaaaccgcgcagggcctgaatgacgtcaagatacaaggctccgcgtctccgggcagagccaaaaacacggcacgaattcgtacaaggaggggataacagcatatggcaactgcacgtagcattcgatcgaacgcggctccagcctcgaaccgaccgcacaccaagcatcagtcctcctcccgacctgagctgcgggtggtctccaacccgcgtggaaacgagcagggcaatgtcgtcggacgggtcatcgaatggaccagaacaagaagcgcaccgctggtgcacgtggccatcgcagtgatcttcctcgtcggcaccttgttcggcgcgctgatgctgcgtacccagatggtgcagaactcgtttgaggcggcacagatcgaaaccaacatcaacagacttacccaagatatcgaagacgatcaggccaaactcgatcaattggtcgcgaacctgcccgacaaggccagcgacatgggcatggtcccgcagcagggatcagtgtccatcgacttaagcggataccagtccaacaaaggcggaacccagtgaacaccattcgtcgcatcgtagagttcgccaaggtcaagaccttcgcgttcaaatgcatcgccatcggcgccgcattggcgttggtggcgtcggcatgcgtgattcagctggcctccacccagctcatcggcggccgtcaaaccgcacaagcggccacggctaaccgcaccctgaccgtgacgttgagcgccaagcgtgggcgtatcctcgacgccaacggctccgtgctcgctcaaagcgtggagcgttatactatcgtcgccaatccggaggctgcacaggagttcgagccgattacttgcaatgacaacacccgtgattactgccacgaaattgacggcaaacccgtgggcgctaccggagcggcggccgtgggccgactgctggccaaagtcctggatatgaacgccatggaactgggcgctgatctgtccggtaccgggcagtatgtgattctgaagaaagatgtgactccgcaggtcaagcgcagcatcgaggcgttgcacctgggcggtattgtctggggtgagctgagcagtgaacgactgtatgcggatggcgatctcatgggcgcgctgcttggcggcgtgaacgacaacggcgatggcgtcgccggcatcgagcaggtcgagaacaagacgcttaccggaaccgatggccatgaaacctaccagcgtggtaatggcggcgaagagattcccggcaccatgaccgaatcggtggcggccaaaaatggcgacgatgtcaccctgaccattgaccgtgatgtgcaatggtatgtcaaaaaggtcttgaaggaggccgaatccaagtatggtgcagcgtgggcgatcgccgtggtgcaggatgtccagagcggggagattctcgcactggccgatagcgatgaagtacaggctggtaccgatgcggcgaagatgagcccgtctcgggccgtgtccgaaaccttcgagcctggttcggtgggcaaggtcatctccatgtccggctatctgcagatgggactgcataagatgagcgatcaattgtcggtcccggaccacatcacacaggagggccagacctacaaggactcattcgaccatggcactgagcgctggacgctcgccggcattctgcagaactcatcgaacgtcggcatgattatggccggggagaactatccggatgagcaacgctacgagtacctgaccaaattcggcatcggacaaccgaccggactgaacctgcccggtgaatcgagcggtctgctcaccaacccttcggcgtgggatctgcgtacgcgcaacaccatcctgtttggtcagggctacaccgtcaacgccctgcagctcaacaacgtggtggccaccatcgcgaacaagggtgtcaagcagcagcagtcgatcatcaaatcaaccaccgatgccaatggcaagaccactgagaccaagaagggcgaagccacccgcgtggtggatgaaaaggtcgcatcggacatgatgaatgcgatggaatcagtggcggaaggctacaacaagttcgtcaaggtcgatggttaccgcatggccgccaagtccggtaccgcagaggtgcagggctcggatggcacgctctcgtccattatctccgattattccgtggtgattcccgcggacaacccgcgctatgcggtcaccgtggtgatgaaggatccgaatggtgtgttcggcggtctgacggccggccctgtttccgcacagatttgtgagttccttatgcagaaatacgaggtgcctgtctccagtccacgcaaaaatgctattccagtcacgtggtaaggatcaggggagaaaggcgatagcccatgagtgcagtgagcgaatccatcgcccagcgggtgaccctgggaatgctggtcgaacggtacggttttgaagtcgatccacccttcgccaccaatgtcaccattacctcactcagcgatgccgtggacaccgtgattcccggctcgctgttcatctgcacgcatgagcaggaacccgatgtactgcatgccgcacaggccggtgcctatgcggcgttgctgccacgcgcgtccaaagggcagatcgccaatgccgatataccgttgctctacggcgatttcgacgatcgcgtactcggcgatctggccagcggtctggccggcggaccgtccaatgccatggcggtgttcgcggtgaccggtgcggatgagcaggccgtcgacgcaggcgtgtcccagctctccgaattcctgcacatgctgggcaatccggtggcggtaatcaccgcatccgggtccacgtcgatgacacgtaccatgaacctgaactatcctctgggcatcctcgatatgcagcgcgcgctgtccgtgtgcgccgaagacggtgtggcggccgtgatcatcgccatggatgaccgcacgttggccgagcatgcgttggaatcggtgaacgtggatgtactgggcacggaggatgtcaacgcaagcgcaagcttgaacgaattgaagacacgctacgcattcgttgcggaacatgacatgtccatgacctcgtcgacacccgaatcggatgaaatggctgcggattcaccggcaatgtatgaccgcgtccgactcgggcacatgtccttggccatcgccatggtgctggccgccggcgtgaggaaaaacaacatacgcagtgccctgcatgtggccaataatctcaattaagtccgtggatacgggacgaagcgtaatcgtaaaggagtttgaaacaccatggttccgatgagcgtggaggagatcgccaaggccgtcgatggtcgattgatcggagacgccggttccgagtctcgagccaccaatacggtcagcgactcgcggcaggccggccccggatcggtgtttgtggccatccgaggcgagcgtgtcgatgggcatgactttgtggcgaaaaccgctggacagggagccacggtggccatcgtcgaccatgaggtgaagtccgatggccttccgcagatcgtagtgaaagacacggtcgacgcccttggcgaactcgcccgatacaacatcgttcgccgccgcgagctggacggcgacttcgacatcatcggattgaccggttcggtgggcaagaccaccaccaaggatctgctctcctccctgcttgccaccgtaggtccgaccgtggctccggtgggatcgttcaacaatgagatcggcctgccgctcactgcgttgcgggtcgatgagcacacccggttcttcgtggctgagatgggtgccagccatatcggcgaaatcgcgcgactgacccgtatcgcaccgccgaacacggcaatcgtattgaaggtcggcgtcgctcaccttggagaattcggctcccgcgaacgcatcgcacaggcgaaaagcgaaatcgtgcagggattgcttcccggaggcaccgcggtactgaacgccgatgacgaacacgtggttcccatggccggcctggccaacggcgacgtgctgtggttcggcttgggatcgtcgcaggagcccgaggtgcgggccattgatgtcactgccgaccggtccgatcatgctgaattcacgttggtcgatgcggacggcaaccatacgccggtgcatctgggcattcctggacgtcacaatgtgatgaacgcgttggccgccgcaaccgtggcgatgcgttacggtatggcacccgaaacggtggcacggattctggcctcgcagcacaccatcagccctcatcgcatggcattgtccacggtgaatcgcgaggggacttccttcacgctgatcgatgattccttcaacgccaatcccgactccatgaaagccggcctgaacgggttgaaggcctggaactcaaatgacggcaaggagccgttccgcgtggcgctgctgggtgccatgctggaactcggcgccgatgaaacggcattgcacacctcgatcggcacgtatgcggacgaattgggcatcgacgcgatcatcgcggtcggttccgcccaagaccaacatctcgatgcactggcacaggctctggcggacggtgcccgtcagagccaatccgcgtcggtggattgcgtacacgacatcgatgcggccgaacagctggtcatcgacttggctcgcaaccatcccgacgctgtggtgctgctcaagggatcgcacgcgtcaggcctgagcgctttggctgaacgctgggcaaagaactgacctgataaccaccccaagaaaccgacaagaaagagaagctgcacgtgattgctctgatcattggaatgctggtgtcgctcatcgtcaccttagtcggcaccccgctgctgattcggctggtccacaagctgcactatggccagtacatccgccaggatgggccgcagtcgcatctggtcaagcgcggcacccccacgttgggcggcgtggtcatcaacttcgcgattctgctcggttgggcatcctccgcactgtaccgatacctgcgttcgggcgacgtgccctcctggtccgcggcgctcgtactgttcgccatgctgtcgatgggtctgctgggctttatcgacgacttcgccaaggtgcgtaagaagcagaacgaaggcctatcggtgggcggcaagttcatcggccagttcatcttcgccaccatctacgcggtacttgcgctgctgattcccaccaaatcgggattccccagtgcgcaggcaggcatcagcttcatcgaacagccgttcttcaacttcgacttcgccggccgtgccgtagccatcatcctgttcgtcatctgggtgaacttcctgatgaccgcatggaccaacgcagtgaatttgacggatggacttgacggtctggcggcaggttcgtcgatgatcgccttcactggttttggcatcatcgcattctgggaaagctaccacatcaagggcggcagccatggcggatattcctatgccgtgtccgatcctctcgatctgaccgtcatcgccgtatgcgcggccgtcgcctgcttcggcttcctgtggtacaactcgaaccccgcatcgattttcatgggtgataccggttccctggccttgggtggtctgttcgcagccctgtccatcgccacgcacaccgaattcctggcggtggttctgggcggactgtacgtcatggaagccatgagcgacgtcatccaggtcgggtacttcaagatgacccacaaacgtgtattcaaaatggcgccgattcaccatcatttcgaactggagggttggaccgaaaccaaggtggtggtgcggttctggatgatcgaactcatcttcgtgctgctcgccctgacgattttctacggcgactgggtcacccgctccggcctgctgttcagctagcggaaatctgggtggattatgctcacccacggaattcctatatcaggaggaacaatgcaagtagcggataagacagtggtgatcgccggactgggggtgtccggcacctcgttggcggaggtattgagggaacgcggcacccacgtgattggcgtcgacgagaggaagcccgaggccgatctccactcctttgatgacgtggactgggaccacgtggactacgtcatgtcgtccccggtgttcaacccccgcaccccgttcgtgctggaagcccaacgccgtggcatccccgtgatgagcgaggtggaattcgcatggcagctgcgtgtgaataacgagcgcaccggtactccggctccatggatcggcatcaccggcaccaacggcaaaacctccaccaccgagatgacctcggaaatgctcaccgcctgcggactcgacgcgccgaccgccggcaatatcgcctccggagacatgagcatgagcctgtctcgttgcgccaccaatccgcagcacgacgtactgtgcgtggaactgagctccttccaattgcacttcaccgattcgctggcacttgactgcgcggcgatcaccaatatcgccgacgatcacctcgactggcatggcgggcgcgagaattacgccgccgacaaatccaaggtgttccacaacgccaaacgcgccatcgtctacaatgcgcaggacgccaaagtcagcgaactggcggccgaggctcagactgccgaaggatgccgcaaggtgggattcacgctcgaggcccctcaagccggccagatcggcattgaagatggctggatcgtggacaggagcggcgtggccggcggcgcagtaggagagtcggtcagactggccgccatcaccgatttcacgcatctggcagagccggacggctcactgtacccgcatctggtggccgatgcattgacggcattggcgttggtgctgggacttggcgctgatcgcgataccgcgttgaaggcgcttacctcgttcaagccgggcggccatcgcatcgaaaccgtggctgaggccgcagtcgagggcggctctgttcgttttgtggacgattccaaagccaccaacggccatgcggcacgcgcctcgctgtccagcttcccggccaagtctgtgatctggattgccggaggtctggccaagggcagtcgattcgaggacctggtcaaggaccaggcacacaccatcaaagcggccgtcatcatcggcaaagaccagcagccgatgatcgaagcgtttgccagccaagctccggacatcccggtgactatcatcgatcccgaagacaacgataccgtcatggatcgtgccgtcgaagcctgcggcacgtataccgccgccggcgacatcgtgcttatggctccggcctgcgcctccatggaccagttcaagtcctacgcggatcgaggcaatcgattcgccgccgcagccaagacgtggagcgaggtgcatggcctccactgatacccataagcgtaaggcatacagagtccctgacaagcccgcactcgaaatcactgactacacgggttggcgaagcttgctcaacccgctatggtgctaccacggcttccgcatggccgtggtggggctgacatgcttcggcctgatcatggtgttctccagctccacggtcaccatggccgcactgggcaagtcgccgttccttcagcttctgaaccagggcgcgttttgcctgatcggcttggtgctgggcttcgtggcattgatgatgccggtgacgttctggaaacggaccggcgtgctctttgtggtgggtgcctgcctgttgcaggcgctgacctttactcctttgggtatcgacgtctatggcaacaaaggttggctgaacctcggcttcaccactatccagccggctgaattcatgaagttcgcgatgtgcatatggctgccctcgtcgttgcatgcctgcagcaagatgtaccacaagaagggaatcaaagcatatgccgcgccgttggtgttgtatgcgataggcgtggcgctggtgatgggcggcagggacctcggcacggccatgattctggtcttcatcggaggcgtggcctttctgatcgtcgggttccccggcaaatggatgggagtcggcgtattgggcgcggtggttatggtcggtgcattggcggtttccagcccgaaccgcttgcgtcgtattctggccacatatggcgattgctcggccgctgacgcgcagagcgtatgctaccagtccattcacgccaagtacgccatcgcctccggaggttttctgggattgggcatcggcaattcgcgggagaaatggaactacctgccggccgcccataacgatttcattttcgcgatcatcggcgaggagaccggattcgtcggttgcgccatcgtattgctgttcttcgcgattctcgcctggtgcatgatcgtcatcgcattgcaggtcaccgatcgttatgttgccatggtgctgatgtgcgtcgccatttggatcgtgggccaggccatggtcaacatcggcgtggtcgtgggtgtgttcccggtattgggcgtgcctatgccgttcgtctccgcaggtggctcatccatgattatgtgcttgacggcggccggactggttgtgggacttatgcgctctcaaccgcagataagacagtcgcgtcagagcgcgtaagtagactcggtaatcatgaatcaaggcacaccacatatcgttcttgctggcggcggtaccgccggacatgtcaatccgctgctcgcggtcgccggggcgattcgcgacatcgaacccacggcacaggtcaccgtcatcggcactgcggtgggtttggagaaggatttggtgccggaggccggctacgagctcgacaccatcgaaaaagtgccgttcccgcgtcgccctaacctgtacatgctgcgcttcccggcaaaatggaagcgagaaaccgccaaggtgcgctccattcttgaaacgcggcatgcggatgtcgtggccggattcggcgggtatgcttccgcccccgtctacgccaccgcacacaagatgggcattccgattgccatccatgagcagaatgcgcgtgccggcatggccaataaactgggcgctcgttgggccgatttcatcggtaccgtgtacgagggcaccggtctcaaaccgcgtgccggagccgacgtcgagcgcgtcggtctgccgttgcgcccggccatcgcctccctgaccaaacgcatcggtgacgaccgtgccgccgtacgccgtgaatcggccgcgcagcttggcgtcgatccgaaccgtccgctggtgctggtcactggcggatcgctgggagcgcaaagcctgaaccgcgccatcgcctcctccgccgcagacctgttggcccacgcacaaatcatccacttgaccgggcgaggcaaaatcagcgaagtacgcgaactggtcacggcctcggccggcgcggacgtgcttaccggcatcggccccgaatcggccggacaaggtgactaccataccgccgaatatctggaacgaatcgatctggcctttgcctgtgccgacttggtgatttgccgtgccggagccggatcggtatccgagctggctgcactgggcctgccggccatttacgtgccgctgcccatcggcaacggcgagcagcgtttcaacgccgagccagtggtgaacgccggcggcggccttctggtcgcagacaaggacctgaccccgcagtgggtgcatgagcatgtgcccgatctgctcgccgatcacgaacgacttgccgaattcggccgcaaggcatgggaatacggcatcagaaacgctgccgaaatcatggcccggcacgttctgcaattagccgaaccatccaagtagtattcagatatcattccgtgcgcgatactgaccaattccgttccgcagcacgagatacggtcataatatagggtgctggaatccctaaaggagttttgaattgtctcaagatcagcccatagtgcttgaccctacgtatgcctcattcgatgctgcggcccgccctgcggatctcggcgccacccatttcatcggtatcggcggtgccggtatgagcgttctggccgaaatgctgcacgccgaaggagtcgcggtggacggctccgatcgcgcacacagcgccaaaaccgaccgacttgaaacgctgggcatcaccgttgaattcgggcagcgagccgaaaatgtcgcccaggccgagaccgtggtctactccagcgccatcaaaccggacaatccggaaatcgtcgcagcacacgcggcgggcaagcgcattgtgcatcgcagtgacatcctcgccctgctcatgaacggcaaacgagccgtcaccgtggccggagcgcacggcaaaaccaccaccagctccatgctgtcccacattctggtgaacgccggtgccgatccaagctacgccatcggcggctttatccaaggcccggacggcaccacgctggacggcggacacgcgggcaaaggcgacatcctggtggccgaagccgacgaatcggacggcagcttcgccaaataccatccgaccatcgccattatcaccaactgtgaagccgatcatctcgaccattacggcgacgaagcccactaccgtgccgcgttcgttgcccacgccggccgggccaccggtcacgtgatcatcagtatcgacgaccccgacggacttgccgtgctggaggccctgcccgccgacgtgaaatcccataccgttgcctacggcactaccgcgcgtgaatccctgcccgatttgggcggtgccgcgtatgtctggatcgcttcggaaagcgagaccgctggcagcggcgtcgaacagctcaccctgcatctgccggccgcggtgacggcgggggagccggtgtctcagagcgttgccctgaaggttcctggcgtgcacaatgcgcgcaatgcggccgccgccatcagcgctgccgtgctgctgggcgtgagccccgcagacgcggccaaggcggccggcacattcctcggtgcggcacgccgcttccaggtgcgcggcacggtcaagcaggtcactgtagtggacgattacgcccatcatcccaccgaaatcgcggccctgctggatgcggcccgacgccggtaccccgattcgaccattcgtgtgatcttccagccacacctgttctcccgcaccaagttcttcgcgcaccagttcgccaaatccttagccaaagccgatgacgtcattatcaccggcatcttcccggcccgtgaaaagcaggccgatttcccggacatcagcccctccaccatcgtggacgcggctgcgggactcaaagatgcttccgcaggcacgtggattcagccggttgaggatatgtgcctggccgccaagatgatggccatgcgcgcccaccacggcgacgtgatcttcaccgtgggcgcgggcgacatcaccgacatggatcaggtgctgctcaccgcacttgaggcccatcgggaaagctgcgagtgatgtccgggcgcacggtcagatccgggggcaatgacaacggctcacgtcgttcgtctgggagctcccgcaagccgcgcaccatcggttcacgcggaaacacgggtcgctcgtcgaagtctcgcgctccccggtccgtgtcttccggtcatgagatcgacgagccggagatcatcgacgatgtgacggtagccaagggccaggccggtgccttcgtcgatgcacggcggttgcacagcgaggattacgttgccgaaacgctgcatcagaccaccggctccctaggagtcgcatcacgcccgaaagtggtgaatttcaccgaacgcgccaaagaacgcaagcgtgcaaacgtgcgcgtcgttgcgttacgcgtgttgattgcggtcgtcagtgtggctgtagtggcggggctggcatggctgctgcttttctcgtcggtgtttcgtctggaaaccagcgagatcggcgtatccggtgccaacgaatgggtgagtgcgcagaccatccatgtcatcgccgataagcaggctggaaagtcgttgttcctggtctccgcccatgaggtcacagagcaactcaagtccattcccggcgtcagcgaggccaaggtctccaaacagttccccaagtcgatgagcgtggaagtcaaggcgcaacggcccgcggccatgctgaaaagaggcgataccctgaccgcggtggattcccaggcgcgtgtgttgaactcggtgaagaacgccaacgtggatggcatcccggtgatcgaggtcaaggatatagacgccagtctcaagaaccgttcggtgaaggagacgctgacgattctgggcgcgttgccggaatcgatgcgtaagtccattaccaaggtcaccgctgagacgcaggattcggtgactaccacgcttaacgacggtgaccgcgtaatcatttggggcgattcttcgcaactgaagctgaagttggcggaagtcgaggaaatcgacaagaacatcaccgctggcacggctggctttgccgggaaacatcagattgatgtttcctcatcccagaagcccatcgtcaagtgacggcgatttcgttggcttcgttggttccggggcggcgttcgctccgttggtcctgctgacaacgttggtcccgtcaatgccggggcgatgttcgctgccggcgatttgcgcgagtagcgccatagggtgtatgctgaaaagtccggccgaaaagccggaagcttgataactcaagattgggggcgatcggtttcgacggtgacctgttcgctgcagggaagcgtgccgagaacgccgggtccgctcgtggatgaccccggcaaaagaataagtgctaaatctaaccgcactgagttcgctctcgctgcctgatttttagtcaggattaaccagtgagcagccgctccgttcactcctcctcgtctttgggaggatgctgagcgtcgtttagaagacttgctgatgcagttgagcctcagggctgcatcgggactttaactgcggatatgctcgccatcagttgtctgcgacatcgatgggggcagaaaaatcgccaacttggccagcagactacgcacgtagaagactgtgggctcggtcatcggaccggggttcaattccccgcgcctccaccaatccgcctcggcggaaacaagccgcttggctttacgaaagtaaggctgagcggcttttcttattcccgtcgattccctcgtattctctcggtttcacgggataatgtgggcaaaatgtgggcaaaaatcgagcccgcgaagccctctgtcacaacgcgagaacggccccgaccggcaagtaggccgactcgggttgagtcgtctgcgatgccggacggggccgaactgtgcgtggtggtcatgcggcgaggtcgaggcgctgtttgatggcgctgacgccgatgagcgcgccggcgaggatgccgagcgcgttgagcgtggtcactatcgcgtccacgtgagtccagccccatgcggggccgaccgtactgacgaacagggcgagtgcgggcaggacgatgaggcccaaccatttgaggatgtcgtagacgcggctggggattgcgcggttggcttcgatccgacgacctgcggttttggagaccgccgctctaccagctgagctacgcgcataggcggtcatgccggttgattgccatggcacatgaccattgggtggatatgagtaaagcccctgaaccggttgattcagaggctttcacactaatcctgatacggagtgtgccacggggtggattcaccctactcccgcttgtgttttgtttttcaggcggcttggatggtgaggcgtccgccgagggcgtggattaccttggcgatggtttggaagctggggttgccgtccttgctgaggctcttgtagaggctttcgcgccccacgcccgcgtccttggcgatctgggtcatgccccgggccttggcgacgttgccgagcgcggcctgcatgagtgcggggtcgtcgtattcggctatggcgttgaggtaggcgatgatgtcctgttcgttttcgaggtattcgctggtgtcgtagtcggtgaattcggtgctcattgtcgttgttccttgtagtcgttgaggatgtcgtgggcttgtctgatgtcggtctgctgggtgcttttgtcgccgcctgcgagcagcagcatgagcacgttgccctgcatggcgaagtagacgcggtatccggccccggtgtggaaccgcatctcgctgaccgggcctcccacgggtttgatgtcgccgaatggcctgcctgcgagcttgcagacatcgagccgggcttggatggcggccttcgctttgtggtccctgagtttcttgaaccacttgcggtattcggcggattgcttgatttccatacctctattgtatcctacagactacatcatgtcaagccgaatggccgctggagcccatagccaacgcaagaatctcccgtatgttgaactcccggtagccgtcatcgacgggtctcgagctggggagtttgccccggttgagccagttgctgatccgcttacggctgacctcgtacccgtagtttcccttgaggcattggctcatgcctgccggtgtcttggtcaggtgtattgcctcggccttgtcgcggctctgctcgcgcagctcctgcacgttgatgggattgccgcacctgcacaggcgcagcgcctcgcccttcgcggccatcacttcgcgtctgcattcggggcagacgccgattatcctgcgggtgcgcggcctgcggtcaaccttggcagagcgtccatggtgcctcgacctgctggctgccgcagtattggcatggttcggtggtgatgactgcacacgttgtactgtagggaaccatgaaagtcgtattgcaacgagtgtccgaagcgtccgtggacgtggtcaatgaattgggcacgctggatcccacgttcgagccgcagcagattggcccgggattcatgattctggtgggcgtcaccgatgaggacggcgacaagcagatcgcctggctggcccataagattctgaatctcagggtgttcgaggatgcgcagggcaagatgaaccgttcgatccaggacatcggcggcgagattctctccatctcgcagttcacgctgttcgccgacgtgcacaagggcaatcgcccgagcttcatcaaggccggcaagcccgagcatgccgatttcatgtggatcaagttcgacgaggcgttgcgctccgggggagtgccggtgaaggaaggtcgtttcggtgcgcatatgcgggtcggactggtcaatgacgggccggtgaccatcgtcatcgacaccgagcatgacatgcctgacggaacacgctgaattgcgatagtaatttgacatcatatcccgttccctccaatatgttactaaagcgctttagtcttctgcgggcgagggcgcatgtcgatatgtttcccatgaacgggcagcacaatgatgtggccgcacaagcggcagagataaggggagtgaacagcagatgttcctgaaacctgaacagcaactggagcggtgcaagcgcatagtgcgccagcgcgtggaccctcatatccacccatcgatcgcacagcttgcggtggagtcctttgacattcccggagagccgatgcccactgacgagttcttcgagaagctcaatcgaggtgacatcgacttcaagccgtttacgctcggcggtgaatggggcaccacatggggcacagtctggttccgcctgaccggtaccgtgccggccggctacccgaaaggcaagccgctggagctcatcctcgacctcggctggtacccgcactcctgcggcggccatatcgagggcctcgtctaccgtgccgacggcaccgccatcaaagccgtacacccgctcaactattgggtgccgttcatggatgctgagggcaacgcgcaagtgccggtcgccgaagacggcagcttcaccctgtacctcgaagccgccagcaacccgctgctgctcggcgtgcctccgttcattgagaccgaactgggcgaccatgccaccggcaagccggacgagccgtacgtattcaagtccgccgatctggccgaattcgatgaacgctacgagaactactccgtcgatctcgacgtggtgagctccctgatggaattcgccgacaaacagtcgccgcgctactggcaactcgccaaagcattgcagcgttcgctgaacgcctacgacgagcgcaaccccgaatccgtggaagccgcgcgcgcagcactcgccggcgtactggccaaaccggccaatgcctcggccatgaacgtcagcgccatcggccacgcgcatatcgactccgcatggctgtggccggtgcgcgagacccgccgcaaggtggcccgcaccgtatccaacgcattggcgctgatggacgccgaccccgacttcaaatacgcgatgagctccgcccagcagtacgcctggctggaagaggatcatccggacatcttcaagcgcatgaagcggcgcattgaagaaggccggttcatcccggtcggcggcatgtgggtggaagccgatggcatgttgcccgccggtgagtcactgatccgccagattgcatatggccgcaaatacttcaaggaacatctcggtgtggagcccaagggcgtatggctgccggacagcttcggctacaccggcgcatggccacagatcgcccgccgtgccgggtacgaatggttcctcacgcagaagatctcgtggaacgataccaccaagttcccgcaccactcgttcatgtgggagggcatcgacggctcgcgcatcttcacccacttcccgccggcggatacctatgctgcttggtgcaaggttcaggaactcgactacgccgagaagaacttccaggacaaggatctctccgaccgctcgcttctgctcttcggtttcggtgatggcggtggcggccccacgcgcaacatgatggagcacctgcaccgctacgagaacctcgaaggcgtctccagggtaactattgagagcccgaacgatttcttcgacaaagcccaccgacagatcgaaaagaacgccggagaggaaatgcccgtctggaagggcgagctgtatctcgaactgcaccgtggcaccttgacctcgcaacaggacatgaaacgcggctgccgccaagaggaatcgctgttgcgcacggtcgaatacctgggcgcagccgccgtgttgtccgatccggagtacgtctacccgcgcgaggagctggaccgcatatggaagacgctgctgctgaaccagttccacgacatcctgcccggctcggccatcgcatgggtgcaccgcgaagcccgtgaggactatcgccgcgacctgaagcgtctcgctgaaatcgcccaagacatgtgcgccgtgctgcgcaaggccaacccgcaggccgacctgctcgccgaagcccgcatcagccagttccgcaatgacggtgcgtcttggcgtgccaaccgcatcaacgaaccgaccgacgcgctttccgtgctgacccagacattggacaacggccgtgtactgctggccaacggcgtactgtccgtcaccatcgaggccgacggtacgatctcgtcgctgcttgacgaggagcatggccgtgaactggttccggccggcacccgactgggccgatacgagctgttgaaggacgaacccgccgtttgggatgcctgggagatcgaacgcgaatccctgctcatggcgaatgccatgaccggatcaatcgaatcggtcgataccgaaaacggtgcggcacgagttcgcgtgcgcaccgccgacgatgacaccgtcatcaccaccaccatcacgctgcgccccggttcacacacgctcgatttccacgccgacatcgactggcatgagcgcgaacgcttcctcaaagtcgccttgccgctgggcattgtggccgatcaggcgacctacgactgccagtatggtctggtccgtcgcccaatcgtcaaaaacaccgcatccgacgaagccaagtatgagagcagcacgaaccgcttcgcccttatcggcgacgccggttacgccgcggccgtcatcaacggatcggtatacgggtccgatgcctcaccgatcgccgggaatgccgccgaaggttgtgactcgggcactatgttccgactgtcgctgctctccgcgccgaccttccccgacccgcgcaccgatatcggtgcgcatgagttcgactggtccgtggtggccaacgccacggtgggccgtgcgcttgacgccgcttgcgcactcaacgcaccgacgcttcatgacatgcccgacttagcgccgctcgcctcgatcgagtcagcaaacggcaccgtggtgttggactggataaagctggccgacgatggctccggagacctgattgtgcgcgcctatgaggcggccggcggcagggccgatgccacgctgcacgtctgcccggcgctcgcaggcgcttcggtgcatgagaccaacgtgttggaaggcgacgatttggccgccgacctgccggtcgcgctgcaagacggcacacagaacgccgaaggcgccacactgcacttcggtccgttccagctcgccaccctgcgcgtcacgcgctgaattctcgcctgacgcttctgcctccttgtaccatgaggggacagaagtatgtcgtattacggtttctccaattgtcaccacacccatcatttccatcagacacagcaaaggagaactctccatgtttcttctgcccaatcagcagttggagcgctgcgaccgcgtcatgcagcagcgcgtcaaaccgcatatccacaccacactcgccgcatgcgccttgcgttcgttccacaatcccggcgaaccggtgccctccagcgaatttctagccaaagtgcgcaacggccaagtgcccttcgaacctttccgcgttcccggagtctggggcaccacatggggcaccacatggttcgaggtgaacggccatatcgacatggcggcggtcaaaggacgaaaagtcgaactcatggtagacctcggctggctcgatcaccgcggccccggattccaatccgagggacttgtctatcgtgccgacggcaccgccatcaaatccgcgaacccacgcaaccactggattccactcgtctacgcggacggcagcagcaccgtagaactcgatgaacatggcgacttcaccgtctatatcgaagccgccgccaacccattcgtcgaaggccccaccccgttctcacccaccgaactcggcgaagaggccaccggcacctgtgacttcccatacacactgagtcgcatggatatcaccatcttcaacgaagacgtgttcgcctactacatggatctggaaaccgtatcttccctgattcgcgaactcaaagacgacgacccgcgctactggcagctcgccaaagcgctgcaacgctccctgaacatctacgatgaacgcgacttggaaaccgtgtcggcagcccgtgcggcgctcgccggcgtactcgccgaaccggccgcctccagcgcaatcaaacacatcgccatcggccacgcgcatatcgactccgcatggctgtggccggtgcgcgagacccgccgcaaggtggcccgtaccgtatccaacgtgctgactttgatggacgaagacccggacttcacgtatgcgatgagttccgcccaacagtacgcatggctggaagaggagcatcccgacctgttcgcacgaatgaagcggcgcatcgaagagggccgcttcatcccggtcggcggcatgtgggtggaatccgacaacatgattccttccggcgaatcattggtgcggcagatcacgttcggccgccgatatttcaaggagcatctcggcgtcgcgccgcgcggcatctggctaccggacagtttcggctacaccggctcttggccgcagatcgcccgccgtgcaggattcgactggttcctcacgcagaagatctcgtggaacgacaccaccaagttcccgcaccactccttcatgtgggagggcatcgacggcacccgtatcctcacgcatttcccgccctccgacacctactgctcgtcgatgagcatgcgcgagctcatgtattcgcagcgcaatttcctggacaaggacctttcccgcaacgccatactgctgtacggctacggcgacggcggtggtggtcccacccgtgagatgaccgcacgcatccggcgcgaccatgatctcgccggcgcgccgaagatcgaattcggtactcccgaccaactgttcgaccgcgtgcgtaaggatatcgtcgacgatgcgcaaggggagaccccggtgttcaagggcgaactgtaccttgaactgcaccgtgccaccctcaccgcccagcaggacatgaagcgcggctgccgccaggaggagtcgatgctgcgcgtcaccgaatacctgtgcgccgcggcccgcatcaagaacccggactatgtctatccgcgcgaagagctggaccgtatttggaaaacgctgctcctgaaccagttccacgacattctgcccggttcggccatcgcatgggtacaccgtcaggcgcggaccgaatacgcgcgtgacatcgctcggctgaacgagatcgcccttgaagccgggcgcgcgatcgcagccgtggaacccgatgacgcaaccataaccgacgccgtaatcgccccatattcccgccaagcctgtgagacgtgggtggtacgcccggcttcgagccgagccgaagcgggaaccgcatccatggctcgggtcgccgttacccatgacggcgatacgattgtgctcgacaacggccaactgcacgtgcgcattgaagccgacggcaccgtttcgtcaatcgtcgatcagcgaaccaatcgtgaactggtgcccgccggcacccgactgggccgctacgaaatgctcaaagacgaacccttccactgggacgcctgggatattcaacgcgatgcgttcctcaccgccaacgcgctcagcgaggcatcgattgcaagcgtggacgaaaccgccaacggtggggccgtcgtgcatgctgtcactcgcgcgaagggcgttgaaattcgtacgggcattgccttaaggccgggctccgccacactggacttcaccgccgatgtggactggcatgccgtcgaacagttcctcaaagtggatatgccggtcactgtgcaagcgctgaacgcgcaatacgaatgccaatacggtctggtcgaacgccccatcaacaagaacacgcgcagcgatgatgccaaattcgaaagctgcacgcaccgcttcgtgcggatcgccgacgccgactatgccgccgctgtggtcaacgcctccacctacggctccgacgtcagccccatccacgccgatgcggcacatggcaccggccgcggcaccatggtgcggctctcgctgctgtccgcaccgctgtaccccgacccacgcaccgaccaaggcgcacactccttcgcgtggtctctggtcgctgacgccgatatgaatgcggtgctggacgaagcggcgcgactcaacagccccgtaataggggagttgcctgatatggcgccgctggtctcgctcgccgacgccaccggcgtcatcgtattggactggatcaagctcgccgatgacggttccagcgatctgatcgtgcgcctgtacgaggccgccggcggcaatgccacggccacactgcgccttgacgccgctctctccgatgccaaggccagcgtgcaggaggtgaatctcatggaggagccggagctggatgccgaactgccgcgcgcgctcgccggtgacgaaccaatgcctgccgacggtgcgatcgtttcgttggcgccattccagctcgccacgctgcgtattcgccgataagggatattgggcctagactcgatattttgggtcgcgcccaaccgtaacggaaccggaacagaccggctctgccatacggttgggcgcggcccattattgtatgagaagagggagagcgatcccgttgggcaaatatcaatgcgacacgcaacgatgaattcgttgcgtgcatgtttcgattgtgttatattattgctaaaccgatttaatttacaggctcgcaactggccggaaactaaagcggtttagtctcagcgatgagaactgaataaaggttgtgataccacgtcaatcaccgcgacgggtgactgtgctggagcacaacgattaggtttctccgtccacagcagggcggggtgaaaaaggaaccaaaaggaaaggaaaacatcatgttttctatgaagaagatcctcgccatcgccggtgccggtgcgatgctcgtatcggtggctgcctgtggtagcggaactgcgggggatgacggcggcaagaaggagatctccttccagacctggaacctcaagaacgacaagtacaccccatatttcgaggcgctgatcaaggcctatgagaaggaccacccggacgtcaccgtcaagtggcttgacgccccgtccgacggttacgaagacaagctgtccagccaggctgcggccggcgaactgccggacatcgtcgacggcggcaactccatcctgtacggtcttgccaaggccggcgcgctgctcgatgtctccaagcaggctccggatgcggaaaaggactactacgaaggcgcatggaagtccgtgaccatgcagggcaatggcatcgagaagggtgcctacggcctgccgtggtatgtcaacgatggcccgacctactggaacaccgagctgatgcagaagtgcggccttgatccgaacaagatcccgaccacatgggatgagtacttcgccgccggcgacaccatcgtgcagaactgcaaggatgtctacctgggcaccacgatgggttacaacaccgaagatctgatgaccgcaggcgtcaagtccttcatgaacgatgaccacagcaagtacaccttcaatgatgaggccggtgtcaagcagatcagccgcttcgttgagctatacaagaagggcggcatcccgccggaggccctcgactcctcctggagccaggccgccgatctcttccagcgtggcaacctggtctccatggccggctccgcctactccgctgacggcttcaagcagaacgctccggacctttacaagaacctcgcagtcggcccgcgtatcagcaacgacggcaagtccgcttccgtggcctacgagatgctcggcatcagcgccaactcgaagcaccccgacgttgccattgacttcgcccgattcgtgaccaacgagaagaaccagatcgagttcgacaagaaggcctccgtgttcccgtccgccaaggggggtctggatgacgactactacaagagcatcgacgaaagcacccttgagggcaaggctctgaagatcacgctcgaccaggtcaaggacggctacggctctcgtccgtccgagttcaccgacaacaacggctccaagaacttccagcagcagatcgccctcgccatgcagggcaagcagaccgccaaggaagcccttgacaagtccgtcgagttcgcaaacgagaagctcgcacagtgagcaacgcggcactcgccgctgacaggtcggaggcccgcacggcctccgaccggcctgaaccgatgaacctcaaccacggcaagaagcagaatcgtagcttcggcaccatcattgccccctacctgtttgttctgccagcgttcgcgattgtgtttgtattcatcgtccttgcggcactcaacactttcaggcttgctttcaccaactccacactgctccgtccgggaaccttcgtcggactcgaaaacttcatcaaactgttccatgacgagtacttcctcacggcactgctgaactccacactctacgtgatctgcgtagtgccgttcatggtgatcctcccgttgatcctggcctatctggtcaagggcaactcccgcatcatgggcttcttccgcaccgccttctacatgccggtggttatgtccgccgttgtggtgggtatgatctggaccaacctgctggattccgccggtctggtcaactccgtgctcaaggcattgaagatcatctccaagccggttccattcctcaccgatcgatggggcgtgctcttcagctcgatgttcgtgacaatctggctgggcctcggctactacatggtcatctacctgaccgccctcgccaacatcgatgaatccctttacgaagccgcctccctcgacggcgctggccctgtccgccagttcatctacgtgacaatgcccggcgtgcgctccacgatgatgctcatcatgatgctgtccaccatcgccgcattccgagtcttcaacgaaatctacgtgttgaccaacggctccgcaggccccggcggcatggatatgacgatgtcgatgcttatcaagcgcgaaggcaccggtatccaggcccgcactggttacgcgagcgccatctccatcgtcgtgctcgtcatcgtcggcgtcatgctcatcgtgcagcagatcgtacaaaagcgaggtgaggactgatgaataccaacacgcataaggtcaccgtcggcaaagtcgtccagtatctgattctgattctgatgttcctgctgctcgtcggcccgttcgtctgggaactgtccctgtcgttcaagggcaagggcgacaacgtctacgccgtgcctccctacctgatgccgaagaccccgacgctggacaactacatttccgtgttcaagcaggtcccggtattccactacatgctcaacacgctggtggtctgcctgatctccatcttcggcaacgtggtcttctccacgatggccggctacgcactgggacgcctgaagtggcgtggccgcggactggtgttcaccatgttcatgggcaccatggtcatcccgatcgaaggcgtgatgatctcccagttcctgatcattcgctccatccacctgcagaacacactgctggcagtcgcactgcctggcctgtgcggcgccatcaacatcctgctcatgaccaacgccttcaaatccattccaatggaactcgaagaggcggccatggtggacggtgccaacctatggcagcggttcttccacatctgtgtaccgcaggtcaaaggcacgatgaccgttgtcggcatcttcgcattcgtcggtgcctggaacgacttcctgtggccgttgatcgcgatctccgatgaaagcaagtacaccttgaccctcggcatgaaccgactcaagggcatgttcatccaagatccgcgactgatcgccgccggtgcgctcgtctcgcttatcccgatcatcgtcttcttctgctgcttccagcgctacttcttccgtggcctggaacagggtggactcaagggctgagcggactggaaaaaggaggtactccaatgaaattcggagtcaactacacgccgtcgcatggctggttccacgcatggctcgacccggactgggacggcatcgacaacgatctcaagcagatcggcgaactgggtatggaccatgtgcgcatcttcccgatctggccgtatctgcaacctaatcgcacctggatcaacaagaagggcgtggcggatgtgcgccgcatggtgcacatcgccggcgagcacggtttggatgcctatgtggacgtgttccaagggcatctgtccagcttcgacttcttgccttcatggctggtcacctggcatgcgggcaacatgttcaccgatgcggacgccgttgcggccgagcgtgaactggtcaagaccatgaccgatgagctgtccaaggaacccgcgttcaagggtctgaccttgggcaacgaggtcaatcagctgtctgacaggccgcatcccacgaagatgagcgccacggaccggcagatcgacgcatggctggacgcgctgcttccgaccgccgccggtgaagggcacaacgcgctgtacagcgtcaacgatggcacctggttcatcgatgggcacccgttcactccggtgcagtccgccaccaagggtgatatgacagtgattcactcctgggtgttcaacggcatcgcgcaaggatacggcgccaccagtgaggagtgctcgtcgtacgcactgtacctggccgagctggccaaggcgttcggcaaggattccgagcgcccggtgtggctccaggaagtcggtgcgccggagaatgtgctggaaaccgactacacgccggaattctgccgcaagaccgttgaacgtgccatggattgccggaacctgtggggtgtgacgtggtggtgctcgcacgatgtgcccgccagcatggaagacttcccgttcttcgagcactctctgggcttgttcgacgagcaaggccagctgaagccgatcggccgtacgttcggggaactcgccgcacagtaccgttccgcattgccggctcagccgaagaccgtcgccgtggtgattgatgtggatgaggccggaaacccggtgaaccgcagcgcgctcggcccgggaggctcggtgtgcgacctgtggatgaagctgcaggtggcgggccagcgcccgaccatcatcacctcgcaggtggcggccaatcaagaggcgctcgcgcagcgtggcattctggaattgcacgctgacgaacacccctatgccgcccgttactacactgcggtttcggacccatcgttcgaaacggctgattaaaccgatatccggttgtggaatcatctactccttgttccacaaccggatattttcaattgcagtgcgcacaattgcagtgcgcagggcaaaacataagacccggtactcgccgaagagcgagaagaacgagaagacaatatacgagaagggggagcgctcaatgagcatcaactgcgccgcagtggaccgactcattgattcgatgagcttcacgcagaaagttggccagttgaaccagcgtctgctcggttggaagtccgtggaacgcaatgctgcgggacggctggtggcctcggacgagctcaagcaggagattgaccgatggggtggactcggcaccctgtacggtctattgcgagccgacccatggtctggtcaacattggggtaacggcatacgccctgaggagcggactgaggcgattgccgtggtgcagcaaactgtgctggaacgtggcgcgcacggcatcggcgtattacttagcgaagaggcgcctcacgggcatcaggcgctgggcggcacggtgctgcccaccaatctgggtttgggcgctacgtttgacccgcagggggtgcaggaagcggaagccgcggttgccgcagaactggccgccagcggcattcatatcgcattggtatccggtttggacatcgcccgtgacccacgctggggccgttgcgaggaatgcttcggcgaggatccgctgatggctgcccgcatgtgcgaggccatcgttaccggcatgcagggtgagcatcgcagcaaggtcggccacgggggagtggccgtggtgctcaagcatctggcggcgcaaggcgaggccgtgggcggccgcaacggacagtccgccgtactgggcccgcacgatcttcatgaaattcatctgccgccggtggccgccggtgtgcgcgccggtgccttgggctttatggcagcctacaacgatatcgattctgtaccttgctgcgccaacccgtggctgctcaaggattatctgcgcgaccagctcggtttcgacggcatcgtgatggccgatggcctggccgtggatcggctcgaagacatggccggctccattcccgcggcagggcgcgccgcactgctcgccggcgtggacgtctccctgtgggatgaaggattcacccgcctcgaagaatatgcggatgacgaacaggtagtggccgctgtcgacacggccttgcgccgggtgctggaactcaaagccatgttcggtctcttgcccgaagacggtgccgataccgccgcaattgccatgccgagcgccgacgccatcgcgcaggccactgcggatgggcgtgagcaggccaagcgcatggcccgcgaggcgataacgctgatcaatgatggccagtctgccgccacgctcgacgatatccgcagcgtcatagctgatgctcaagccggccctgtgattgtcgccggcccgttcgccgacgatttcggctgcttcctgggcgattacaccgcccctctgcccgccgatgaacagtcaagcgtctaccggcaattggtggcacgtctcggggaggaccgggttctcttggccgccaagccgagcgatgcgccggccgatcaatgggcgcgtgcgtcgaccgtggtattcgtatgcggcagcaccagcgaacgcagctatgacagtgaattcgacgacaatggcgcggcgaaggccgtaaccgaatacggtgccacctgcggcgaaggcgtggacttgtctgacatccgcctgccctggcgtcaggatgacatgctaggcgaagtcgcggcattgaccaccgctccaattgtttcggtggcggtgtgcggtcgcgcgcatgtactgaccgatgtgctggaacgctccgccgtgacgatctgggccggatatgccggccaatatgggccgcaggccgtagccgacgtattggttgacggagccgacatgtctggccgccttcctgtgaccttacccgcatatcccgcagccattcccgttcgatacaatgaccgccaaagtgccgcgcatgtctacaaggatgcggcggaaccgatattgcgcggcttcggctatggagccggttcgctggcggcggtgacgttcagcgagatgcacgccgatacgcaatcgcatccaggtgaagtgctggtgcaggtgacggcacatgctgacgatcacggggccgcgggtgccgtgaatctgttcgcgcatgtcagcggcggccgccgcatcccacgtttggcaatgcttgtcgattcggtatacatggacttgaacgcgggagagcgtcgcgatatcgcgttccacgtgccgtgtgatcgtctgcgggatgtcggtgacgggcaagttcaggtgacctgcacgctggatggagattcgacgcatacggtcacggcgacgctgccgggggaatattagggggcctgtatgaatgtgggggtgcgaagcactggaaccgcatcacacccccggatggagcctgaaaccgcaaggcatccatcctcgcaacctgcaagtctgcgggttgtcacccgatagaggaaacaacaaaggagattatatatgtgttgctcacaaggtagtgaagggcgctcgtccatcgggcgcagactcgccgccgtcgcggcgggcgtagtcgccacggcactgatgctcggatgttcgctggccatgggaacggttgcgaacgcccaggagggggattcccccgttgcggcgtcgcaggagggtaacggcaacaagcatttcatggtgtattaccgcgcatggcgtgacgtgaccatgaaaggcgtgaacaccgatttaccggatgacaattggatctccatgtacgacattccatacggcatcgatgtcgtcaatgtgttcagctacgttcccagtggccaggaagcggcggcccagccgttctatgacaagctcaagagcgattacgcgccgtatctgcatgcccgaggcatcaaactcgtacgaggtttggattacagcggtgttatggtcgacggtttcaagacgtggattgctcagcagggcaaaaacgtcgatagcgcgaccgaatcggattatgacgcgtacgccgatcatgtcatcgaaacgtacatgacctcggttggcctcgacggtcttgacatcgatatggaaactttcccggatgccgcgcaggtggcgatttccgatcaggtcatcacagccctcgccaagcgcatcgggccgaagtcggataacccggaaggcacgatgttcctttacgacaccaatggcagctacactgctccgtttaagaacgtttctgattgcttcgactatgttgcctaccagcagtacggttccgattcgaaccggacggccaaggccgctgccacctacgaacagtttatcgactcgaccaagttcgttcccggtctgaccttccccgaagagggtgacatgaataaccggtggaacgacgcgaccgaaccatacctggacagtcatttctatgatgtggcctcatactcgtacgaccacaatctcggaggcatgttcgtctacgcgctcgaccgcgacggacgcacctattccgacgatgatttggcacacatcaaaccgtcgaatctgatttggacgaagacagccatcgcacaaagccaaggcatgagtctggaaaacgccaagcaggctgccaaccatttccttgaccgtatgtcctataccaaggatgttccagccgaaacgcgccaaaccgtggcagcggccaccaacctgtatgaggtgaacaaggcggtgctcggcgcggattggaacgacggatacagcaacacatatgatccgacgctcgaactttccctgacctccatcgacaccacggcacttaccggtgccatagccaaggcggatgcattgctagctgacggcgcaaccgataccgatgtgcggacaacgctgaccacggccagaaacgcggcggtcactggcctgaccagcaagctgtataccggagctgacgttgtctcctggacggcatcgctcaacgccgcaatcgcagatgcaacgggcggcaagcccaagccgcaacagccaggcacaggcgaaacggacaaacctagttccggtgacgcatcacacaacaagccacagtctgcaaccggacgtctggcaagcaccggttccgatggcaccgtcgtgctatcggtcgccgtgattatgacgctcgccggtatcagcgtattcgcagtccgccgccgcggataacaccggttcgaatgaaccgaaaaacagtatttgggatacggcgcgatatgcgaagcgccgtatcccatggcccacatcggtagggacgaagtagtacgcagacggttgatctccggcgtaagccggaagaagtcaaaggagattatagatgagattgtcactaggcgatcccgctgggtgtacttctgcccgggctcaacacaggaaatggctgtgcagcggtctggccgcggtattgtcgatgaccacgctggcggcgttggccgcaccggccagcgccaccggcacaatgccatgggggtgttcctatgtttttgtcaactccttggggagttgacgtgtcgggattccggttggctgtcgtgggcgcgcttcgccctgccggtggcgtccggcgtcctttcccgtgtggcccgattcaggctacgagggctggttcctggtagaggacgccgtttttgagcatgctgtagattacgtcgcagcgtcggcgcgcgaggcagatgacagcggcgttgtggtgcttgccctgttcgcgtttgcgcttgtagtaggcgatggacggcgggtgtttggcggacgcgacgaacaaggactgtcacagcgcgttcctgaggcgtttgttgccccgtctggagggtctctcgcccttgatgctggtgccggactggccggtggccggagcgatgccggcgtaggcggccaggtgggccgcgcttttgaagttggcgatgtcgccgacgatgttccagcctaccaggacttcatgaagcagatcgtcgatcagggcatttacatccagtggtacgactcagccacatacccgggtggcggcgtaggctaccaagacatgttcaacggcagcaattcgccgtatgggcaggatacggacaagggcaagatctctgattccatcttcctgaactactggttcagcggcaacatgcttaaggattcggccgctcacgccgagagtttcggcatcgatccgaaatatgcggtgtttgctggcatcgagtccggacagaagaagttcgacagtatcggcagcaatgcgggctatatgaacgtcaatctcgacgatacaggtaagccgtatgtgagcctcgccgcgctcggcaccgacttcgtctcccgcgaactgggcgacgacaagaaggtctatccgaaataccagaaccaggtgttcgaccgcgaacgccgactgtggaccggctcgtccaccggcgagaagggcaccaccgacatcgccgacaattacatcgacgacggcacgagcaatgacggttggaagggcttcgcttcccagatcgccgaatgctccgtggttggcggttccatgttctctacgtcgttcaacaccggtcacggtctcgaatggcgtgatggcggcgaacggaccagcgaccagcagtggggcaacatcaacctgcaggatattctgccgacatggcagtggtggatcgatgccgactccgacccgctgcaggccgacttcgactacggtaaggactacgaggcggtaccacgcttcaagtacaccaaggtcggtggttacgaaggcggcgattcgctggtgctgagcggcaagctctccaacgacaacaccattcgcctgtacaagaccgacctggatgtcgctgccggctccaaggttgacctgacctacaacaagctcaacagcgatgattccaagttgcagcttggcctcatccttgccgacgaccccgagaccgtggtgccggtggacgtgacggacggttcggcaggcaacggctggaagaccgcgagcgtggacctgtcccagtacgcgggtaagaagatcgccacgctcaagctctacgccgtgggcgcggacggctcgcgttcgctcgccaccgaagcgccgctgaacgaagcggcggccgtctccgacgtgaaagtcgaaccaggcaaggacggcaacgtcaaggtctcttggaccaatccgcaggtatccggcgagaaaaccgtgaccgtcaaatccgacaccggttcgtggcgttacgccgcgaagccgtattcccagaccgtcaaggtcgccgccgacaagagcaaagtgacgattgccaatgcgccggttgacagctcccgctatgtggtgaacgtcgataatgcaggtggcactaccgctacggcaacaggtgcatttgccgatgccgccattgagccgtatccggcttgctcggtgatctggaatggcgataatgtgacgctggcccgtcctgagactcaagactggcgctacctgtacatgaccgagaagtggatcggcgagaatggcaagcagcagcaggagaaccagctgggtgctagctacacctactcgcagaacactccgccaatcactggtattatccgtggtcgtaccacacctgcctcatacaccaggtccatcccccgccagtcatgaactgcgggtgcaggtcgaggattacagcggcaacaagaccgatccggtgaagattccgaccgccgacgaactggccaagtgcacggtcgccgaccccacccagccggatgccaagaagtccacgctgaccgcggtcgacggttcggccgtggccgacggcaaggccatccgcacggtgcaggcaacggtcaaggattcgttcggcaatccgctggccaatgccgaggtggcgtttgaactgcccgaaggcgtctcggccattggcggaaacaccaccgtcaagaccgatgccgccggcgtggcttcgctgaacgtcgtgtccacgaaggtcggcaagtacacggtgaaggccgtgctgaacggcaatgccatcggcaagggcgtcaccgtcgaattcaccaaggtcgcggtgacgccgaacaagcccggcgaccagaacaagcctggcgataccaagccgaacaagcccagccagaacgacaacaagaacaatgacaagaatggcgcttcgttgagtgccacgggttcgtcggtcattgcgattgtggcggccatggtggtgctgcttgccacgggtgcggtggtacttcgcgctcgtagcaagacggagtagttcgtcgcaatacgggtgttgatactcgtgccataagcgggatttaggggttgcccaatgggtgcccccctaaatcccgtttgttttgtcgcaggacatatgccgagaccagtgactaaaatgctttagttatttgactaaaattatggcctttcgctgtttggtgtgggtgagtgggtcgggggggtggtggtgctggtcgggtagtttgggggtatggataccacgtcgttgttcaccgccgccctgcaactgcctgacccgtggagggtgtcgggcgtggagttccgtgacgaggaggacggcagacgggaactgcatatcgcgatcgggttcgcggcgggttcgcggttcccctgcccggaaccggggtgcggcgaggccgcgtgtccggtgcatgacgcgagggagcgcgtgtggcggcatctgaacttcttccagtacaaggcgttcattcacgcgggcgtgccgcgcgtgacgtgccccgcccacggcgtgcacgcggtcccggtgccgtgggcgaggccgggaagcgggttcacgctcctgttcgaggcgatggtcgtggagctggccaaaagccagccggtcgcggacatcgccgagcaggtcggcgaacatgacacccgcctgtggcggttcatccgccattacgtggacgaggcgaggctttacgaggactacacgggcgtggaggccataggcatcgacgagaccagccggaagggccaccggtacatcaccgtggtcgccgacctggtggagcgcaacgtaatctgcgtggtcccgggcaaggactcgaccacgatcaaacggttcgcgcgggatttcatggatcacaacggcgatcccgaccgggtgcgtctggttacctgcgacatgagcctggggttcgccaagggcatccgcgagcggctgcccaacgcggcgagaatcatcgacaagttccacgtgatcaaacacgccaacgaggccgtcgacaaggtccgcaaacaggaggcccgcggcaacgcgctgctcaagcggaccaagtacctgtggttgaggaacgaatcgaacctgaccggcctgcaattggaaaccaagcgcagcctgcaacggcgacgattgaaaaccggacgcgcctgtcagatgcgcgagaccctccaggacatctacgacaccagcgccgatcgagccgaggccgagacggccctcaagcgtctgtgctcgtggatgacgcgctcccgactcgaacccatgaaagagttcgcccgccagatacgccgccactggcgggacatcctcgcctacttcgaccacccctacaccaacgcgatcctcgaaggactcaacagcgtcatccagaacgtcaagacccgagcccgcggattcaagaacatgggctacttcagcaccatgatctacctgacctgcggcaaactcgacctcagcaccgtcaccacctgacagacccacccacaccaaacagcgaaaggccaaaattattgatatcataagagttagcgcacggttgatgcatatggcccaatgcgggggtgccgtcaaccgtatcgcaatagtcgcaatgcggtcgtaaaaaggagtgttcatgagatctgctcgcgaggcatcgtcatcgtctgacggcacgcagcgtgtgagcctgaaagacatcgcagatgaattaggcatctcgcagaccgcggtatccttcgccatcaatgatcggcccggcgtttccgcggaaaccaaacgtcgggtcaaagaggctgcagccaggctcggctggacgccggtctacgccgcacaagcactgggatcctcgaagaccatgaccataggctttgcccccgcacgatccatgcaggggctcacggatgaaagcttcatgctgcacttcatggcgggtgtgcacgcctcgctcagccccaaaggctatggtttgctgtaccgcccatgccgattcctgaacgaggagatgagcgtatacaaggattggacgtcgcgcaagcgcgtggatggcgttatcctcgtcgatttgcgagccgatgatccacgcccggaattgttgaagaatctgggtgtgcgcgcagtgcttgccggaggacccgacccgaacaattatgtgccgtcactgtccatcgatgattcacgcacgatgggaaccgtgctcgaacatttgtcgtcattgggacaccgccgaatcgcctatctttccggcgatccgaacctggattattcacaggggcgtgtcgcggcgttccgcgcatttgccaaacggcgaaagctggaatccatcaacatcgaattcaccgattttgttgcggaacaggccgcgatgctcacgttggagatgctgcattcaccgaagccgcctaccgcgttcatctatgaaacggagatcctcgccgcggccagtcttcacgccatggccgaagattattccgctcggcagatggaggcgggggagggccatgcggaagtctatccgaatgggctgcccgccattgtcagttttgaagacagtttcatttgtgaggcggcgtatccgtcaattaccgccgcgcatcgtgatgccagcgaatacggtgccaaagtggccaaactgctgctcaaagtgcttgccggagagcaggtgagcggcaaccggcgaatcctcaccccgaaactggtgattcgggacagcaccgccaagcccatggataccatggcgtagaacggtcattgcatcggcttgcagacaatgacatgcgaccagtacggcgttggcccccgtattccacgggggccaacgccgttgagaaagaggaagaaaaaaggatatagaggcttagatgctgtcgattattcagcgttcttcacggccgtcgcaatggacacggccgggtccaagaacggaatcagcgtggactggaaggcgtggtacaggtcggacttgcccggccagaccgtgccgatcacgcgattgtcgccgtcaagctggtggaaccatgatccgccttcgtggtcgatgacgtgctcgtcgacgtagcgggcgaatgtggcgtaccagttggcgtatcgtgcctcgccggtggcagcgtgcagcgtggcggcggtgttcaacgattcggcggccgtccaatgcatgcggtcggtgaccaccggtgtgccgttccagtcggtcgtatagacgagcccctccgcgccgtccgcgttccacgcatcgtccaccgcccgcgcaaacaggtgctcggcggcgtcgatgtagggccgcgcgccgtctcggttggcgaaggagctcagcgcccactgcacgatgaggcgcgcccattcgatgccatggcccggcgtggcgccatacggtttgaactggtcgtccttcttgtcggcgttgcattcgaggtccaacgaccagtcggatttgaaatgctcggggatgcgccaccggttgtgtgccgcccattcgatgacgtggtcgatgatgcggccggcgcggacgcgataggtgttgttcccggtggcgtcggccacggccaggaatgcctcggtggtgtgcatattggcgttgataccgcgatacgggtccagctcggtgaatgccgtgtcccaggtgtcgacggctaggccgatctcgtcgtcccagaaatgctcgtcatatgtggcgagcgcctcgtcgagcagttccttggcgcccggacgcccggccagcagggcggaggacgcggcgagtatcacgaaggcatgcgcatagcagaccttgcccggcgcatgggtgccgtccgcgaacacctgcggataccagccgccgtgctcgtcgtcatgcagaatgccggtcaatcccttgagcgccgcgtcggccagctcgcccgcacccgggtatccgagcatggcgccaatcgaatacacatgggccatacggctggtgatccacgtttcgacgccgtgtgaggggtcgagggtgccgtcggcgttcagccagccggaaccgccatccggcgctgggaagcctttgccgaacttcagcagctcgtaggtttcggaagccatgaaaaggcggttggcttcggtgccgagcgtataacgtgggttattggtcataatgattgttcctttccttaatgagaacatgcggtgggtgcgcaatgagcatgcggcgggcacgtcttagtgcttcacgtgaatgtcgaaatagtccatgaccagttcgcagaacatcatattcgaccagctgaaccattcgcgcgtgtacttggttggatcatccacgtcgatgccttcgtgcatgagatgcgtaccggcgtcggtggccacgagacggtcgagaatatgcgccttgaaatccttgctgtcgctggtcatcgcctcgatggacagcgcgatgggccacacatatcgtggcggcgtatgcggcgagccgatgcccttgaggtactcgccctcgtaatagtacgggttttcgtcgctgagcagcgtgcgtcgggttgccagataggtcggatcgtccggtgcgcagtaccccaagtaaggggccgccatcaaggagggcacattgctgtcgtccatgatattgacgtgacccagaccgtcggtctcgaacgcgtagattgtctctccgttgcggttcgtcgtcttggcgtgggcttcgatgccttcggtgatggtgcggcgcagcttgccggcgcgtgcggcgatatcggcgtcatgcagaatctccccgccgaagatgcgttccagatagcccatcaccactgcggcgaacatgttcgagggcaccagatagtggtaggtgcaggcgtcgtcgctggggcggaagccggaccaggtcatgccggtgtacgccaccggcaaccccttgccgtcattgctcagcgattcggtggggatgtccgtgtcgcggatgaagaaatacggggagttctcgtgatgctgttcggtctcgaagacgtcaagaatcttcttgacgccggcaatgaattcgtcattgaaatgatcggtgttgccggtgttcgcatacagcatccaggccagctgaatggggtagcacagcgagtccacctcgtacttgcgctcccaaagccagggactggagaagtcggactgatcatccttgtcccaggaagcgccgttcggctcctcgttgaaggcgttcgcatacgggtcgatggtgatgtagcggaactgctgccgcaccagaccggcgatcaggctcgcaatgtcgccgtcttcggcggcaagggccagatacgggcgcaattgggcggtcgaatcacgcagccacatggccgggatatcgccggtgagcaggaatgtggtgccgtcgtcatgccgtttgaccgtggtggtcagggtgttggcaaagcatgcgttgaagttctcggcccaggcggcgtgttcggtgccgcacaggtccgtgatgtgctgcatgaaatccgagaccgacttcggtatcgcggtggtcgtcataattcaacttctttgtttgagggatatacgtatcaagggaacagcattattctaaaccgctttagttcatgacacgcgaaaggatgtgaagagcatgagtgtgagcgcaccatatgaaaaaccggtgagatttcctgttcggagaatctcaccggttgcgatcagtcgattcgtgaagtcgcacgaatggcggataaggggatgggtggattacttgccgatttcagccagatagtcgggcatctcggccgggtactgcggccaggcaccggcctgggtgcagacgtaggcggcggtgttgacggccttgcggtgggcttcggcgagcgtgtcacccagcaggatgcgtgcggtgaaggtgccggagaaggagtcgcctgcgccgacggtgtcgttcacctcgacgcgcggggtgtccagcgtggagacctcgcccttgcgggagatgatggtggagtaggcggagccggcggtcagaatcacgtagtcgaggtcgaattcctcgaggaaccagcgggaggcgtcttcaccggaggtgccgcgaatgtcgaacatgtcgcgcagcagcaggagttcctcgtcgttgatcttgaagacggtggccaccttgaggagttcctcgataagctccttggagtagtggtcgccgcgcaggttgatgtcgaagaacttcatcgcgcccggcttggtgtgcttgagcagctccgtgatggtggcgtgcgattcgggagagcgcagggccaaggtgccgaagcagacggcgtcggccttggagaccacgtcgatgagctggcgggtgtacaggatgtgatcccaagccacgcccttgacgatggtgtactccgggataccgttcttcagcgcgacttcgacggtggaggtcggccaggcgttgcgctgaagaacggtgttgatgccggcctcgtcggccttggcaatcagttcgtcgccgagttcatcctcgccgaccgcgctgatggcccagccttcggtgccgttcttcatcgcgtggtaggcgaagttgacgggggcgccgccggctcgcttgccgctcggcagcatgtcccacagcagttcaccgaggctcagaacgatcggggtagtcatggttggtttcctttcctttgtttcctttatcgggtgtttcgtatggaaaatcttgtgatgtcggcgcttggtttaggagacgtcgaagaacaccgaggggtgttcgaggaattgggtcactgccactgctgcggcaccggagaccgccgcgtcggcggacaaggtggataggctgatggaagtggaggcattgatttcggggatggcccgttcggccaccgtggcgcgcacctcatcgagcagtatcgggccggcttcggacacgatgtcgccgatgatgatgtgctcgggattgtatccattgaagatggtgacgcatccgtagccgacgtatcgggcgacttcgcggacaatggcgattgccgcttcgtcgccgtcgccggctttggcgaacagggcgcgggcggcttcggtgtgggtcatatcggccgcgccgggaaccacggtgccatcggcgatgagcgtatcgtgaatggcgggggtggagcagtagcgttcaaggcagccgacgttgccgcaatcgcaggggcggccgttgacgtcaatggagatgtgtccgatttcggtggcggcaccgaggaagccgttgatgaggcgaccgttgtcgatgacgccgaggcccacgccttcgccgaccagataataggcgaggttgtcgtcggcgtgcaccgacgggtcgaagagataatgtgcgagggcgccggcgcgggcgtcctgttcgatgaacactggcacgcggaaagcggtggcgaattcgtcgatgaagttgattttgcgccagccctgcatgttggacaccacggcggtgcggcctacgttacgcagataggggccgggcactgccatgccgatggccacgatggatgggtcgttgtcgagcagttgttcgacgcgctggtggatggtgacgatggagtcgttgatggtgttgtcgcacaccgtgggcaggttttcaaagctcagggtgttgccgcacaggtcgaacacgccgatctgcaccagcgagcgggcgaatttgatgccgatgatgcggaagtgcgtggtgttgagcttgagtccgatggaacggcggttcttggagccttccagatcgccggtctcttcaatcatgccggcctcgataaggcgtgcggtgattttggtgatggccgcgggggtgagttccagtgccttggcgatttgcgcgcgggaactgatgccgttgtgatacaggtgcttgacgatgcgggagcggttggattcggagacactggcctgggaagtggcgtgggtggtgtttgttgccatcggtcttaagtcctccttgtctgcaccgctgcgagttgttccgctcgtctttgaatctgaacttgattaagatattaacgctgttaattgattgacgcaatcaatatgtcattcggcgtgtcgtgcatgtgagtgtcgtcttgggtgaatttgttaagatagttgtcaatagtcagatgtacactgatatcaagcgaaacgttcgatgaagaacaggggaggactgatgtccgaaaacactatgaacaatctcaaaatcggtgttgacgtgggcggaacaaaaatcgaagctgtgctggttgacgcaatgggcacggtattgggttccgcccgtattcccgccagacatggcaacgatgccgtgatcgaagacatcgtcgctgtagcgcatcaggcggcgggtgagcgttttgacgaggtgagggccatcggtgtcggtaccccgggcacggtggattcggccagcgggcatgtgggcaatatcgtgaatctcgacgtggtctcgctggatatggggccgttgatctcgcagcgttcgggcgtgccggcccatgtggaaaacgacgtcaacgccgccgccgtcggcgcggccaccgtgttgggcggtgcagatggcatggccggtaccattgcgttcctgaacttcggcaccggactggctgcgggcattgtcgaaaacggcgtgctgatgcatggctatagcggtgcggccggcgaaatcggccatatcccagtcgaacctcatcgcctcaagtgcccttgcgggcaatacggatgcttggaaaccgtctgctcgggcgcatccgtgggacgtctgtggcccaacgccgacccgccgatgcccgacctgattcgtcgcgcgaaaaagcgggaggccgaggccgtcgatgtgctggacatggtagtgcgcgccatcggcgacactatccagattttggcccaatccgttgacccgcgactgattgtcttgggtggcggcatggccaaaaccggtgaaccgttggtcgaggtgatcacggctgagctgcgccggcgcgaatcgcaatgccgattccttgaaacgctggacctgccggcccggctgcgtctggcacccgtcgatcaaccggtcggagccatcggtgccgccatggcggcatagcactggcatagtgccggggcatggaagatgaggcgtcggatttgtctccgagaccgcatcttccatgcggtcctatatcgctttatgtcgtgctgtgccgcgctgtgccgcgcttggccttgcgcgtttcgttgccggggtggccagctttatttggccaagtgttggaagaccacggcgatggcctcgccctgtacggtgatgtcgggtccgcattcgcagcgccggatcaccgtgtgtttatggaaggacgaggacgtggcggcatccagatactgctgtgccgcgtcaatgaacgtctcgttgatgatgttcggctgcccatagacgcatacgtctgccatatccaaaaggcccacaggcatggacagggcctggccgagatagcggcccgcccgagcgaggatattctgatgctgctccacgtctgccgcgctgagctgctttttcaatgcggttccggaaatcatcgtctccaggcagccgcgcttgccgcaagggcatagcggcccatcaaggtcgatggaaatatggccgatttcgccggccgcatgcagttcgccgattaccggcgtgtccgagagcagaatcgccgagccgatgcctctttcgatgcgcacgaagagcatattcggcccgccctggccgaagaaacgttcggtgagcatggctgcggtgacgtcgttgctgacgttcacctcaagtccaaaatgctcggcaatcggcgtggacaggtcgagattgttccatccgcgcatcgtggaggagcggaccacgccgttatccaccacgccgggggaagagactccgatgccgatgacctcgccgtcggacatgcccagcatcttctcgataagttcgatgatcacatccacggaaacgaatgagccggtgttcagggtgacttcggcgtggcgtagcggctggccgagcagattggtgactgcaccgtgcagcaggtgctcctgcgtcaggtcgatgctgatgatgcgcagtcgatcgatatcgatgctcagcagtgtgcctcgtttgcctttgccgccgctgggtgcctgaccggtctcgcgcagcaatccttcctccagcatctgaccgaccacatcggaaacggccacgcggctcaatccggtgcgtcggccgagctcggcgcgcgaatactggttggtggggaacagcaacctgaagatgagttggcggttcttgcggcgcacatcggcgggggaggccttggccgcatggtcgtcggtcgttgtgttgagaccgagatatgacatgtttcctcctgcctgatggtgagcgagtggacggcgattgttgttccgtacacagcttagacggtgaagcacaatttcgtcgttgaaactgttatgaaacttcactaataaattccagtgtacctgtgtgaagcgtcaggaaacaccgtgagtgttcataaggtccaaaattgttactatcattaacaaatagcgaatcgccaatcgtcactatgacgaacggtggttggaacgccgcgcggcacccggacgtgacaaggatgttgccattatccgcaagacgggcggcggtacggcgactcgcatcgggcgggccgcacggaactggaggaaaccgatgccggaaatcatcattgtcaagaacgaagccgaggccggcgagatctacggccgttgcgtggcggacctgatcaaagcaaagccggacgctgtgctgggcctggccactggttccagcccgctggccgcctatcaggcgctcgccaagatcgtcaaggacgaggccattgacgtttcgggcgtgcgtggtttcgcgcttgatgaatacatcggactgccgctgacccatcccgagtcctatcatgcgaccatccatcgcactgtggtcgaaccgctcggcctggacccggccaaagtccatgtgcccggcgacgtacttaacggcactccgcttgaagacggcgacaagatcgcgctggccggcccggcctatgatcgtgccatcgaagccgctggcggcatcgacgtgcagatcctcggcatcggcaccgacggccacgtcggcttcaacgagcccggttcctcgctggcctccggcactcgcgtcaagaccttggccgaacagacccgcatcgacaacgcgcgcttcttcgacaacgacatcaaccaagtgcccacccactgcatcacgcagggtattggcacgatcatgaaggcccgtcacctcgtgctgctggcgttcggtgccggcaaggccgaagccatcgaggagacggtggaaggcggcgtgtcagcgttctgcccggcttccgcgctgcagatgcacccgcacgccacgattatcgtggatgaggaggccgcgtcccgcctgcgccacaaggactactaccgttacgcctacacccacaagccggcctggcagggcatctgagttatcgtgtgctggcttccctctttgtgtgaggggagctgtcgaatgtaatgagactgagggtggttatcggcggcggcatatgtgtattgcttcccgattggaccactctcagtctcgtttcgcgagccagctcccgttggcgggagcgcatgagcggtaaggagaacaacatgtctgataggaacgagatagtctcgcgcgtgaccgcggcactggagggcaagccggctccggtggcgattcgcaacgcgcgcaaggtggatgcgtgcggcgaacggcgcggatattgggtcgtctccgatgccgccggcgtcatcgtggcggccggcacgggggaggaggccttcgagcactactgccgcacggtggggctcgacccggccgatcgcaacgcggtcatcgacgccgaaggccgtattctgacccccggctacgtggacatccacgcgcacggcgcatgggagaagagcttcgacgacgggtcggatggcatcgatgtggcgcgggccggccacgccgtgcacggcaccacgcgccaggtgctctcgctgatcaccaatcccgtggacgtgatctgccggaacatccgcaccgtccgcgccaagatggagtccggccgccccgacatcttaggctgtcatctggaaggtccgttcctggctctggcccgcaagggcgcacatgacccggaatgtctcaaggatccggtacccgacatcgtcgacgacatgcttgaggcttcaggcgcggcgaacagcaagattggctgcatccgccagatcaccatcgcccccgaactaccccacggcatctccgccatccgccagttcgccgctgccggcgtggtgccggccgtgggccactgcgacgccgactacgagaccgccaaagccggcttcgacgcgggcgcgggcatcatgacccacatgttcaacgcgatgaacggcctgcaccaccgcgagcccggtccgattccggccgcggtggaggatccgcgcgtcaccatcgagctcatcaacgacggatttcacgtgcaggatccgatggtgagcctctccttccggttcgcgcctcatcgtacggccttcgtaaccgatgcaatggccgcgaccgactgcccggacggtgcctacaagttgggtgcactggacgtgaacgtggtcgacgggcatgcgcgtttggtctccaacggcgccatcgccggctccactctgctgctggaggtcgccgtgcgccgtgcggtgtgcgaactgggcttgagcccggtggacgcggtcgaggccgccacattgacgccggccaaggcgttcggcttcgaccggccgaacccggtcaccggggtgcctatcggcctcatcgcccctggcttcgccgccgatttcaaccttgccgatccgaccgattggacggtcgaacaggtgtggtgcgcgggccgcaagctcaagtagcagtaggccgaccggttgacgaatggaaagcattcgtctacaagcatgttcaaatggtgacatgatagtatgttcatctcaccatttgaacgttattcacgtcgtaatacaagaatccgtaatactgctcgataccgcataaaaccggccatggtcgccacaagcgaaacataagtcgatggctgtggaaacgcaggagtaacacatcctcaccatagtcaggcggtaatccacgcccgcagtgatggcgtggaaacaagttatgagagaggattcctgttgaattccaagaagattctggccgccgccgtctccgtggccgccatcgcatccctgaccgcctgcggcggtgtgaaggatgacaccaccgcaggcgccgattccggcaacgtcatcaccatcggcaccaccgataagatcaccagcctggaccccgccggctcctacgacaacggctcctacgccgtgcagatccaggtgttcccgttcctgtatgcccaggactacaacacctccgagctgagcccggacatcgccgccgatgacggtacctggaacgatgacggcaccgaattcaccgtcaagctcaaggacggcctgaagtttgccaacggcaacgacctgaccgcttccgacgtcaagttctcctacgaccgcatcaagaagatcaacgacccgaacggcccgagctccctgctcgccaacgtcgaatccgtgaccgctaaggacgacaccaccgtggtgttcaaggattccgtgcctttcgacgtgactttgaagcaggtcatgtccagccccgccggcccgatcgtcgatgaggataccttcgacgccgacaagctcaccgacgccgacaccatcgtctccaagaaggccttcgccggcccgtacacgctgaccgccttcaagatcaacgagtccgccgcctacgctaagaacgactcctacaagggcctgaccccggccaagaactccgccgtgcaggtcaagtacttcgccgacgcctccaacctgaagatggccgtccagcagggccagatcgacgtggccaaccgctccctgagcccgaccgacatcgaggacctctccaaggactccaaggtcaaggtcgtcaagggcccgggcggtgaggagcgcttcatcgccttcaacttcaagattcagccctacggcgaatcccagcccgacgccgacgccaacaaggccaaggccgtgcgccaggccgtcgccaacctcatcgaccgcgaagagctctccaccaaggtctacaagggcacctacaccccgatgtactccttcatcccggacggcctggccggtcacgatgacacgctgaagtccgcctacggcgacggcaacggcaagccgagcaccgagaaggccaagaaggtcctcgccgacgccggcgtcaccaccccggtcgacctcaagctccagtacaacaacgaccactacggctccgtctccgccgacgaatacgctgccctgaagtcccagcttgaggcaggcggcctgttcaaggtcgacatgcagtccaccgaatggacccagtacaacaaggatcgtgtggttaccgacgattccgacggtgtgtacccggtctaccagcttggatggttcccggactactccgacccggacaactacctgtccccgttcttccgcgatggcaacttcgtgaacaacggctactccaacaaggaagtcaacgacctgatcgtcaagcaggccggcgagaaggacgagtccgctcgtggagacatcctcaagcagattcagaagctcgagaccgaagacctctccaccatcccgctgctgcagggtgcccaggtcgccgtcaccggcacctccgtgaagggtgtcaccctcgacgcttccttccgcttccgctatgcctccgtcaccaagggctgatccagcatgagctcccctctttgagggggagctgtctgccgacggcagactgaggggagcccaactcgtatgactcccctcagtcggcttcgccgccagctcccctcggagaggggagcctttattgctttatataccgattaccaacaccaaggagcatcgcgtgtcagacagcgccatagcgacctccagcaccactccggcgaaagccaagacgaagaagaaccgactgtcaggtggtttcttccgcttcgtgctgacgaggttccttctcattattcccaccgttttcattctggtcaccatcgtgttcttcgtgatgcgcgccaccggcgacccgatttccgccgccctgggcggccgcctgacacccgccgaactccagcagcgcatccacgcggccggctatgaccgcccgctgatcgtgcaatacgtcgactatcttggcggcctgctgcacggcgacctcggcacgacgctgaccgataaccagccggtgatcagcatccttacgcactacggcgccgccacattcgaactggccttcctcgccctgatcgtggcgctgatcgtcggcatcggcctaggccgactcgccgcccgcaaacgcgaccgtgccgccgacgccggcatccgcaccttcgccatcctgtgctacgccaccccggtgttcttcctcggcctggtcctgaagctcatcttcgccgtctggctcaacatcctgcccgcctccggccgctccgacctgaactccgaaatgcagttcacccgtctggtctcgccgaccggcttctacatcatcgacgccatccagctcggcgacatgaacgtgctcgtcgacgtgctgcgccacgccgtgctgccggccgtcgccctaggcctcctgaccgccggcgtgttcatccgtctggtacgcaccaacgtcatctccacctacaattccggctacgtcgaggccgcccgctcgcgcggcgtctccgaaaagcgcctgctcaacaagcacgcctggcgaccggccctgatcccgatcatcaccgtcatgggcatgcagatcgccctgatgctcgccggcgcggtcctgaccgaaaccaccttcgaatggaagggactgggcttcatgctgtcccagtacctgaaggcccgtgacttcgtggccgtgcagggcatcgtgatccttatcgccatcatcgtggccgtcgtcaacttcctcgtcgacgtcatcgccgcgcttatcgacccgagagtgaggtactgagatgaccaccgcatcccaagacaagatcaccgtccccggtgacgaccgccttaccaagctcaacgtcagcaccaagacgccgttctggaccaagatcccgatcatcaaggaactgcgcgtggcggtcggctggcagaagggcatgctgatcaccggtctcgcgatcaccgcgttcttcctgctcgtggccctcttcgccccgctgatcgccccctacggccacgcccagatcaaggccgccgacggcacgtccttcccggcgcaggccgcaccctccgccgaacacatctggggcaccaccgccgccggattcgacgtgttctcccgtgtggtgtggggcgcccgcaccgccgtcatcgccatcgtcgtggccgtgctgctctccatcttcgccggcgtgctgcttggtctggtgtccggctactacggtggctgggtggaccgcatcctggtgatgatcgccgacgccgtctactccttcccctcgctgctgctcgccattctgatggccatcatgatctcccacggccagtccggcctgtggagcggcatcctggcctccggcatctccatcaccgtggtgtacatcccgcagtatttccgcacaattcgcgccgaagtgatccgcatcaaggaatccgcgtatgtcgagtccgcgcgcgtggtcggcgcctccacctggcgcatcatgaccaagcacctgttcaagaactccacccgcacgctgccggtgatcctgacgctgaactcgtccgaagccatcctgaccctcgccggcctgggcttcctcggcttcggcatcgagccgaccgccgccgccgaatggggctacgacctgaaccgttcggtttccgacgtgaccgccggcatctggtggaccgccgtgttcccgggcatcgccatcgtgcttatcgtgctcggcatcacgctcgtgggcgaatcgctcaacgatctggccgacccgcgtctgcgcgcccgcaagtccgccggcgaagtggtcggatcgatcgaagacacgtccgtcgacccaaacgagaagccgtccgcacgcaacgaggtgatcgccgaactcgacgcgaacgtcgacccaccggccaccgtcaccgaccatgacccgaccatcgtcgcctccgaatggaccggcgaaggcaagccggaaggcaaggagtgagagatgagcgaagacaacaagaatctcgccgatatcaaggacctgtccgtctccttcatgaccgacgccggttccatcaaggccgtcgaggacgtgaacttcaccattccgcgcaagaccgtggtcggcgtggtcggcgaatccggttccggcaagtccgtgaccgcgcgctccatcatcaagctgctgccggagacggccaccacctccggtgccgtctacctgtccaagcgcgatggctccgattcgctggacgtgctctccctgagcggcgaacagctgcgcgaagtgcgtggttccgaggccgcgatggtgttccaggagcccaattcggtgctgaacccggtgtacaccatcggctggcagattgaagagggcctgcgcgcccacggcatgaaggacaagaaggaactgcgcgccaaggccatcgacatcctgaagaaggtcggcatcccggatgccgaaacccgcgtggactactacccgcaccagttctccggtggccagaagcagcgcatcgtcatcgccatggcgttggtgctgaaccccggcctgattctggccgacgagcccaccaccgccctcgacgtgaccgtgcaggccgaaattctcgacctgctgcgcctcgcccgtgacgagttcgacgcctccgtgctcatcatcacccacaacatgggcgtgatcgcggacatcgccgaccaggtggtcgtcatgtaccgcggccacgtggtcgagcagggcgacgtggagcagatcttctaccatccgaaggacgactacaccaagcgactgctgggtgccgtgccgcgcatcggtcagaagctggtcgtgcgcgaccgcgagggcaaaccgatcgagcgcaaggccgattggcgcgaacagccgatcgccgttgaggccaagaacctgaccatcacgtacccgggccatctcatgcagcccgacttcaaggccgtggacggcgcgaacttcaccatccaccgctccgaagtgctgggcctggtgggcgagtccggttccggcaagtccaccaccggccgtgccatcgccggcctgcagaaggtgtccggcggctccctgaacgtgctcggcatcgagatgaacggcgtcaaggagcgtgacttcaagcccaagcgcgcggacattggtttcgtgttccaggatccgggctcctcgttcaacccgctgatgaccatcgcggagaatgtggccgagccgctgctcgtgcaccacaagtacggttccgtggccgatgccaagaactatgtgggcgatctgctggagatggtccagctgccgcgcgcctacatgaaccgtttcccgcatgagctgtccggcggccagcgccagagggcgtctttggcgcgtggtttggcgttgaagccgtcgctgctgatcgccgatgagccgacttctgcattggacgtgtcggtgcaggccaaggtgttggagctgttcaagcgactgcaggcggaaatcggcttcgcgtgcctgttcatcacccatgatttggcggtggtcgatatgcttgccgaccgcatcatggtgatgcataagggccagatcgtggagcacggcgatgccgaccagattatgcagcacccggagaacccgtacaccaagaagctgctggcctccctgcccgtgcccgacccgcgcgaacagcagcaacaccgcgcccacctccacgagctcctagcccaagaggcgtaatcgcatagcattggagctccctcgtcagagggagctaactttatatccgctagtactgctgcccatcgaactggaacagggcgtgggcgtcgccgtgttttttgttctcgatgtaagtatggaacagctccagccgctcgctcgtgctggccgccaggggagtgggcaggtcatccagatcgaaccagccgacgctcaggctttcctcgtcgcctacgaacggctcggcattgccgccgggcttcagggcgcacaggaacgaatgatccatgtacatggtgttgtcgccattggcgtaggtcagtaccttgtttgacgaggtgacggccaccaaatcggtgacgatggcatcgatgcccgtctcctccttgatttcgcgcaccaccgtgtccgccggctgttcgcccggctcgttgatgccgtagaccatcgcccattcgcccgtgtccgaacgacggcccaacagcagttgaccatgttcgttcagtacacaaccggtcacgccattgagccacaacagatcatggccgatcttcttacgcaattccaacacaaattccggagtggacacattgcctccttagtagaaaaaaggagctccctctgatgagggagcttaagggttacttggcttgggcagcctgcttaatatggtgcgcttcgcgcatgatttcattttcctcgcgcttgtcagcgttcggcgtcgcctacaatcagtccaccggactgattgctttacggctccgcatccacgcttcgacgtcgtcgatctgcttcgggatgccggcggaaatccattcggggccgttctcggtcatgagcacgtcgtcctcgatacggatgccgatgccgcggtattccggcggaatcagcagatcatcctcgcggaagtacagaccgggctcgatggtgaagatcatgccgggcgtgatcttcgcgccctgataggactcatagcgggcctgcgcgcaatcatgcacatcaagacctaggtggtgggccacgccgcaggcgagccaacggcggtgctgctggccttgcggggacagtgactcctcgacgctcaccggcagcagaccccaatcgtgcagacgctcggcgatcacacgcatgcaggcgtggtggatgtcggaataggtggcacccggcttggcggcttcgaaaccggcctgctgcgagtccagcacggcctggtacagacgcttctggaagtcggtgaacttgccgttggtcgggaaggtgcgggtgatgtcggccgtgtacagggaatcgacctcaacgccggcatccaccagcagcatgtcgccggtcttcaccacaccggtattgcgcatccagtgcagaatcggggcgtgggggccggaggccacgatggagtcgtaaccgatggcgttgcccagctcacgggacacggcgttgaacgcgccttcgaggatacgctcggaacgcggcttgtcgagcgcggccggcagtgcggagagcagacggtcgaagccgtgcttggtggcgtccacggccttgcgcatctcgttgatttcgtagccgtctttgaccatgcgtgcctcggcggcgaactcgtgcagcttgtcgtcggatgcggagttcttgtccggatcggcgaaaccgttggcctcgcggatggactcgaccatcgaggtgatttcgggatcggtctcgctgaccacgcgcacacgcacggcgccggcctcggcacccacgtccttggacagggcgtcggccagctgggcgatgtcgtgggtctcgatgccggtcatcgcctgcatctccttgaggccagcacgcgggccaacccagtattcgccgtagtgggcggacatgaagaagtcctcggtggagttgtcggcgcgaggtgccacgaacagttccggagtgtgcgtcttgccggcggcggcttcgggggagtcggggtcgaccgggttcaggaccagcacggcgccggcctcgtaatcggaacccagaccggtgtagtaggcgaacgtggtgtccgggcggaacatgtaatcgcaatcattgttgcgcaccttcggctggccggccggaatgaccagacgctcgcccgggaaggctttgcccagcgcctcaaggcgggctggcgtgaacttggaggattcgagaggattgatctccggatcatcgtcggcccagccggacttcatgaactccttgaatgcggccgactgcgggcgcagcgagcggttgttcacgcggtcgctcatcgactggttcgcgcccggtgccgtagcgcgctcttcggcctcgtattccttgtccttggcggtgatcacttcacccattgccactctcctgtatgtagttgttgtcgaatcatcgattcccacctcatactagtcggctttatgcgatgtgccacgattgacggctgacggtaaaaccaagtacggaatttggacggtcttccggacatgcccatatggcgagtgcggcgggctggaatgcgggcccgtttattgttctcggtagggaaggagaggggcatgggcttgggctggagcttgccgattgatattgacatattctgtgggctgaatccatgtgaacccacgcgatgaaggtttatcgcgtcgcgggactcactgctatgcggaggtctccacctgaggcaccccggctttgatcagttttacccgcagcggagtacgttcgatgacgtcggcgtatgtgaaatggacgatttcggtggcaccggctcgtttcagtccctcgtcgcgtgcgcgttccttggccaccacctcctgaatgctgcggttatcggtcatggctgggtccacgtatttttgtgtgccgtcgtattcggccactatcacgcgcccgtcatcgagcttccatacgaaatcaacgcggtactcggtattcgtctgtgggtcggtcaccgttacctgaatacgcggcgtgaggaagcgaccttcgatgatggtgcctcgcgcgagggattctccaccattctcgctcctttcgtttgcatagcgcagcaggcggaatactcgggcataatcgattctccattgaacgcagtcggcggctatctcttccttggttattcccttggcaagggccgagtcaaagatcggcaacgcaaaccgaaaatcaaggtctatagcggcctcgaccaaggttctagccggtgatatcagggataggccggaggcctcgtaatgtgtcttcggattgttcatatcgggcatatagacatgtcgtaagcgctgatggcattgacgagatccatgatcggaagtcacgatggttatgcagtcatcatgcaaatgccattgatgttcgaatccataggcacttactgccaccaagccgccaaaaacccactgaggatgctcttgcgcaagagcgcgggccatgtgcaacgttcgctccggcggcgtcaaaccatcccagtatgcagtatttgcataaagactgggaatgccgtcatacactttcaacaactcaccactctgggcacggcggcgtagagcggtctgttccgcttcatttcttgaatagacgcatctcagctcattctgcgcggctgatatgagcgaggccactgctttgtgtgtcttcatgacgtcgagcgtagccggaacgaagcagcgtaagtatgaatttcagccattgtggttctagcctcggagcttggctgtcttggagcgagatactcccgatgatttcaaggtattaggccgctaattcggaatagtggataacatacaaaacttatccaccatcagtaatgtcattcgaacaacgtgctttggggattcgaacaagatatcatcggcgaaggcggatgtagctggtagagggcggcgaattgacggttaacggtgcttatgctttgtacgccgtcggtgctggttcagatattggctggcttctgtctgagtgtggaatctagcgtcggcgtgagtccaatggttgtatcggggccgacgatttgctgcaatttattggcggcatagatccagggcttggacggctgccgacggtgagagcagtcataacagtgaatgagcctctgcgagttcaaaagatgatgtagaggacgtttgtgagagtcgtttccggggcaagacatggtcgattgacgacgttgaaatttctcaacgacggcagaatggcatgccttggcgaggagacgacactgagaggcgatggagtcgggattaatccaggttttggccagctaccgacgcgcaagagcatcatagcgtcggtgtaccgccagaagctggcactgtaccgacgctgaatagcatcagcgtcgccggacatacaagttttggattacaaccgactaagaatgggatgccgacggcaagagccgcattgcaactatatgagacggcttcactgtgcgtggctgcaggtagagactgcccgcgcggcggcgacatatgagacggtttcactgtgcgcgcacgataaaccaccccggcggctaggatagagggaattgagggagtgcggctccacgcgtgaaggcaagaatcccgaaccatgcggggcaaacctgtgcaaggggagcttcctgcgcatgcggaagcggaatatatgcgggcatgcgtagacatgacgagaatggcgcgaacacgtaagtggcatacgcactccgaacggcgcaacagcaacacgagcagaggttagaagaggatatgtcattcgagcatccgaatcggaacaatgagagcatgcgggacgtcgaactggacatcatgagccgcccgccggagcataacaccaccaatctggatctcgaccggatgaacctgatgctcgacatcctgggccacccggagcagtcgttccgcgtgattcatatcaccggcaccaacggcaaaggctccaccgcacgcatggccgaggccatctgccgcgcctacggtatgcgcaccggcctgttcacgtcgccgcatctggagaagatcaacgagcgtatcgccatcgacggccagcagctgtccgatgacgatttcatcgacatctgggaccagaccaaggatctcgtggccctggtggacgccaagatggaggagcaaggcaagccgaagatgagcttcttcgaggtgctcaccgccatggccatctggaagttcgccgacacgcccgtggacgtggccatcgtcgaggtcggcatgggaggcctgtgggacgccaccaacgtgctcaacgcggatgcggccatcatcggcccggtggacatggaccacatgcagtggctgggcgacaccgtcgaacagatcgccaccgagaaggccggcatcatcaagccgaactgcaccgccatcatcggcccgcagccgcatgaggaagccgtcatgccgattctcgccgaagccgccgaacgcaaccacgccatgctcgtgcgcgacggctacgaaatgaccgcgtccgaccgtatggccgcagtcggcggccaagtcgccaccctgaccacgcccaacggcacttacgagggcgtgccgatcgccaagttcggcgagcatcaggcccacaacgcgcttgccgcgctcgccgcctccgaagtggtgattccggtcaacggtccgctggacggcgacttggtggccgaggcgttgagctcggtcaagattcccggacgcatcgaacagatccgcacctcaccgaccatcattctggatggcggacacaacgtgaatgccgccgaagccctgcgcaaggccatcgaggaaagctacgacttcaagcagctggtcggtgtggtcgccatgatgcgcgacaagcaggtcgaggaatatctgggtgttctggagccgatcctgagctccgtggtggtcaccgagaattcgtggcgcgagcgcgtgatgccggccgacgagcttgagaagattgccgtggacgtgttcggtcgtgaccgtgtgatcaaggaagcgaacctgcctgacgcgattcagaccgccgtcaatatggtcgatgccgaggacgagctgggcgtgggctacggccacggcgtgcttatctgcggcagcttcgtcaccgccggcgacgcacgcctgatgcttgaggaacacgccagccccacgatgaggcaggctatggccgttcatcagccggcggttgacccggacgattcggatcagccggcagacaaggccgaggatgaggccgccgacaacctcgaggattcggtaagcccggacgacttcgacgtgttcgacgtcctcggcctcggcaaggaacaggccagtgacgccggtaacgccggcaccggcacggccagtgccgacaccgacaccgacgattccgccgacgcccggtaacccgcatccaaggcatatcggatacccggacacccggcatacggaaaacagtctcacgccatgtatctcaaggaactcaccctccgcggattcaaatccttcgcctccgccgccacgctgcgcttcgagcccggcatcacggcggtcgtcggccccaacggttcgggcaagtcgaacatcgtcgacgccctgatctgggtaatgggtgagcagggcgccaaaaacctgcgcggcacttcgatggaggacgtgattttcgcaggcacgtcctcccgcccgccattgggccgtgcacaggtgagcctgaccatcgataattccgatcacacgctcgatatcgattacacggaagtcaccatctcccgcaccatcttccgcaacggaggctccgaatacgcgatcaacggctcgcaatgccgtctgctcgacattcaggaactcctctccgataccggtcttggccagcagatgcacgtgattgtgggtcagggacgattggatgcgattctgaaggccgacccgtccggccaccgcgcgttcatcgaagaggccgccggcatcctgaagcaccgcaagcgcaaggaacgcgcgttgcgcaagttggccaataccgaaacgaacctgagtcgacttgacgatttgctgggggagattcaccgccagctcggccccctcggacgccaggcacgcatctcccggcgcgccgacgcgattcagatatccgtacgcgacgcccaagcacgcctgtatgccgaagacgcccaacgctcgatgaaccgccgcgacacggtacgtcaagagcttggcgatgtgcgcaaccagctggccgtcgcccaacgtgaactcgcccacgtcaaagtacgcatcgaacaggtcgaggcgttgggctctgaatccagtccggccatcgccaaggccaaccaatactggcatgaattctcacagacccgtgaacgactgaacgcgctcgcccagttggccgaagagcgcagccggtcactcaccggccagatcgtcaccaactccggtgaggatcccggcatgctcgtcaaacgagccgaggaactggagtctcaggccgcggcacagaccaaggccgtggccgatgcacgcatcgcactcgacaaggccaccgaggaacgcgccgacgacgagaagaagcttgcctcagtccgccagaccttgacggaactgcgcaaaaccgcacaggagcgcgatgcgcagatcgcccgactgcgcgaactcatcgcccgcgaggaatccgccgtgcaactggcgaccagccgcgccaaggattatgcctcccaacgcgacttgctgacttcccagcgcgacgatgcccagcaacagctggacgcattgcgcagcgaagcggactccattgccgacgatgacggtgccgcattggacgccgcgcgtgcaacgctcgccgaatgccgcgaacgactgaacgaactcgccgataagcagcgcgagatacagtccaagatcatctcgctcaaagccaaggccgatgcgcttgccgacacgctaggcagccgcaatgcctccggatcgttggagcgtgatacggacgtggcctcgcttggccgactcaccgacttcatccatgtggccgaaggctgggaagaagccgtggcccacgcgctcgaccagcatgccagcgccatcgtggtacccgaggcaggcaacatgttgcacgccctcgaacgcgctcgggaagataagctcggcaaagccgtggtgctgaccgcgagcattgccggcgatcccgccacagagccaggcacggagtcggaggagagtagcgccgagaacacggcggccgccccgcgatcgggcaacgcgctggcggcactcgtcaccgcgaacccggatgcaaagaacccggcacaggccgaagctgtcgtgcacaccgtgcgtctcctgctggctgatgtagccatggccggcaccgccgacgaagcacagcacatcgtggcatccggcgaagccatgcgggccgtcaccaagaacggcgagaccttcacacacggcgtggcggcggtcggcggctcttccatctctcaatcggacctgtctttggccgcacgccgagacaaggcattggcacaggtcaaacagttggccgcccaagacggcggaatggctgagcaagtggccgaggccaaagccaaacgcgatgaagcggcccgactcgtcgaccaggaatccgccaaacgcaccgaagcccggctcaaagcccaacaggcggagaaatctctgaaatccgccacagaccgcgtcgcatcgttcacccgtcagcttgagcagctggataggaaaatcaccgagacccaagagaatcgcaacgagcatcagctcaagctcgacgatctcaatcgcgctttggcatcggcccagcaatccacagcggaacatgccgatttcgacgaactcgatgaacgcgaacgcacgctggagcgcgaactgaacctgactcgcgagcatgaggtcgccgcaaaaatcgcgtggaccgaagcaagccgcaaaggggagtcactgagccgacaggccgggctgctgcgggacaacgccaaagaaaccgccgaacgccgcgcccgcatcgaggcgttgaacgatcgcagacgcgagcaggccgcacacctgcaaggcgtggccgatgacgcgcgagcagtggccgccatggtagagcatacgctgcatgacgtggccgccaaacgagacgagctgcaggccgccgcctccagccatgacgaggaactcaaggccctgcgcgcgcagcgcaaccagatcgagcccaaggtcaccgatctgaccgggcgcgaacatgccttggatgtaaaccgcgaacggttggccgccgaatccgggcagctcatgcaaaaagtgtccgacgaactcggtctcactttggaggaattggttagtgattacggccccgaacagccggtgcccgtgctggatgatgagggcaaccctgtgccgttggatgagacggaagctgaggctgagaccgaagagggagaaaccgggggagagaccggcaccaacggcgattccgaccgctttaagaccgtgccgtataaccgtcaggagcagaagaagcgtctcgataaggctcgccgcgatctggccgcactcggcaagatcaaccctttggccaccgaggaattcgaagcgcttgaggagcggaacaagtatctcaatgatcagcgcaacgatgtggtcaaatcacgtgacgatttgatgcagctcatcaaggatctcgattccacgatggtccaggtattcaaatccgcgttcgacgataccgccgaggcattcgagcagatgttcgccacgctgttcccaggcggcaccggacgactgcgcctggaaaacccggaagacatgctcaccaccggcgtactggtcgaggccagcccggccggcaagcgcgtcaaacagctgagcctcctgtccggcggcgaacgttcgctgaccgcgctggcgctgctgttcgcgattttcaccgcccgccccagcccgttctatgtgatggacgaggtcgaggccgcgttggacgacgtgaacctgacccgtttgattaatgcgttcaatgagctacgcgcccatgcgcagctcatcatcattacgcaccagcaacgcaccatgtcgattgccgacgcgctttacggcgtaaccatgagagccgatggcgtaacagccgtggtgagtcaaaaactcgaacgataaacgaatggttcccgctgacaggaactggtaccacaggtgacagagggcggtccatatcgaaagaccgccctctgtctcgcttcgttcgacagctcccaccagcgggagcggggaggtattagcgcaatgccttgcgcacgccctgtacagtctgcagcgtcttgtagaagaccttcttgatgggtacgtcgcgggcgggggccaccggggtgatttcctcggtgaacttgcacttgaactcgttaaggcccttgagagacggcgcgaagtcggagccaatgcccatgagatcgtattcagtaataccctgcgagcccaggatgcagcattcggaatacagcagcttgtcggtcacatgcagacgcataacctcgttgcgcatgccggcatagtagcgcaccgcatgcgtgccgttcacggtgacaatcgaccatgccaccacacggtcttcaatacgtgcggcgaacacacggcaatgatcggcacccaacgcgccgatcatatcggaatagtcgctcatcggagcaggcgtgaatccatcgcgctggccggtctcgaccatcacatcgtaatattcggagaaatcggccagcgccttatccgtctcatcggcaacctcggccgggcactcgcgcagagacttgcgcacgtcacggcgtccacgacgcttcatccgagccagaatctcatcatcgccaccagtgatgtcgatgaccacggtctggtcgtacggcactgtggacagcaccttctccgtaccatcggcgaaccaggtgtcgatacgcaggaacgcgatgttcttgtcggccttcttgacggtgtccacgatggcgtcgacgacctcgcgctcctcagcttcggtgggcttggcagcccacgccggcccatgcatcgagcgcagataatgataaccgtgcgtctcaaaatcgataaaggagatcacggcgaccaattcaccatcacgcttgatcagataatcgccccatggcgtgcgtccgtcgatatccgcctgaaaaccagaccaaaccttggtctgttcgataggcaacgtgatgccggccttctcggcttcggcttccagtgtggctccgtcaactttctccaacgtgatcattacgattcagctatcctttttcgttcgtatccgtatgtcgtgtttctggtttggtcgtattgcgcgtgatctgatgtgggccaatcggaatccgatcaggatctgattggccggaatcccgtcacaagccaaacatgcgttcgaccacgtgatcgtcgccgtcgaacggcacatgcttgtgatggtccttgatccaacgctcgttgcccttgccgatgatcagcaggatgttgaatcggtcggcgtgcgcacgggcatcgtaaatggcgttggtgatggccgtcggacggtcggaaatcaccgtggagaccacatccttgttcgtgatgtagccttgcatttccatgcagatgtcgatgaacggctcggtgtccgtatcttcggcggtgaaaatgaagttcgcgatgcggttctcggcagcctcgacgatttccttacgacgatcgtaggccttgttgccggccgatccggtcaccagcgtgatacgcgggttttcctcgccccaacgctcgtagacgaagtcaagcagcgcggtgacggatgcgtagttgtgcgcataatcgacgatggcgagcgtgttcgactgcggatcgcggaactgttccatacggccggcgatacgtacggattcgatggcgtgcagtgcgccggcgtcatcgagcgatacgccagccgcatgggcgatggcgatggccgccgccgcgttgaggtagttgaagtcgccatcgatggacagatggtagtcgccaagggtctgatctccgtcggcgatgtggaaggaggcgtgctccgggtcggcgggccaggcgacgacgtccgcactggtgccggcattatccgcgtcatgcagggcgaaggtggtcacgccgatgccggctgcctccgcgtcctcccgcaacagatcggcgtgcagactgtccgcgccgagtaccagcgacttcgcgttgacgatgatctggcgcttgcaatacaggtaatcctcgaacgtggggtgttcgatcgggctgatgtggtcgggggagatgttgaggaacgcggccacatcgaaagtcagtccgtagacgcggtccaccttgtacgcctgggaggagacctccatcaccagatacttcatgccgttatcggccgcctcgcgcatcatgcggaaggcgtccatcgattcgggcgtggtcagatcggattcgacgtaggtgtggccgtcaaggcaattatcgaccgaggagaacaatgcggccttgccgccggagacggcgttgataagcgcctgcgtgaagtacgaggtggtcgtcttgcccttggtgccggtgacgccgatgaccgtgagctcgttctgcggatatccgtagaacgcggcggacagcaggctcatcgccttgcgtgcgtcgttgacgatcaggccgggggtggcggttgcggctgagtactcggtttcggccacgtatgcggccaggccggcttcgtcgatgccgttcagatactcggccttgaatcggcccttgcagcacagcagggtgcccggcgtgaccttgcgggtgtcgtaggtgatgccggcgaacggttcatccgccgaagcgatacgggccgggtcgtcggtccagacatccccttggatgatttcacgcagcagatggtgttccttgagcaggtcagcggccgaagccaaagtcaaagccataattgttactccctattatctagccgatacgccattctacaggtggggtgcagcgtgttgtgactcacacgtcatcgaccacgatatgggcacatgatttgattagaatggtgaaccgtgacgacaagcgaagcaactatgcaatccgggcagtcagccggatcgggcgagtccatggcagccaagcgcgccagatttgaacagctcgccatgcccgccgtcaatgcactgtaccggcaggcgatgaggctgaccaacaatcccgatgacgcgcaggatctggtccaggacaccttcgaacgcgggttcaaggccttcgactcattccagccgggctccaacttcgaggcgtggatgaccaccatcgagcgcaatgcctacttcaaccagtatgccaaggccaagcggcgcccgcagcgtgccaacgactccaccggcgaatacgacgattgggacatttacgatgccgccgaacatacgtcggacgggctcaagtccgctgaagaggaatatttggacgccttcgcgcccgaggaaatcatggccgcgctcgccaaactctcgccggaacgccggcaggtgttcatcgacgccgccatcgacggcaagtcctaccagcaggtggccgatgagcagggcgtgaaaatcggcacggtaatgagccgcctgaatcgcgcccgcacgcaactcaagcgtgagctcgcctcgtatgcgaaagagcgcgggtacgtgactggttcgtcggctggttcaccatccgcgaagttgagcgaaaacgttggtcgaatcgccgattccggccataatggaagtagtgaacaaactgttggcagcaatggcgacacgcaagccgtagtgagacatagtcatgcgactcacgcccacacgccacaacagtcaagcaagctttcgggaaaggagatctgatgaacgatcagccggtagagcgtactcgccatatctccataacccgtacgggggccgatggcatggtcagccagaccgaagtgcatatcacggcggtgcatcatcgttcagtggataccggctcggcctctgcgtcggtccaggcggacgtgcatatcgttacggagggcgactgttttgaccctcgtacctgctgcgacgagcgtgaacaggcgttgattgccgcgttgcgtgcctacttgcgcccggatgtggcacccgaatgtctgatggcccggctcaaggccacgcttgatcactgctgcggcgaagataagtaacgacatatacaacaaggcccgtctgatgtatcatcagacgggccttgagcgttctataagaaacgcgaagaatcaggcgttaggacgcttgccgtggttggcggccttcttacgacgatccttgcgcttacgtccgcgcatgcccatgatggactcctttgctgcagtaaaaaaataagccttcggaattatgccacataagtacgacgtgatgcaacacgggtgtccatgtggcgatgatcgtcaggcttggttattcggtttttcagatttgttcggcgtggaaggtgaccacggtggtgtagtcatcgcccggctcgagcacaaccagatccttgccggtgcggaaggcgtcggcgtaggcggtcatcggttcgacggccacgccggcctgacgaaccttctcgccgatttcgttgccggtgcacacctgccaggagttgatggtcttgtcgccggtcagcgtgaccttgatgccgtcggggcgggtgaacacggcggaagtgctgccgtcttcaccgcggttggtgatatcggtccaggcatcatcgaagccacgtccctccagcgtggggttatcgcgcaggtcgaagatgccggaaaccggctcttcaccggtgggcagcaggtgttcgtctacggtcacgtgagtatcgcagtgcagctcaagacggcagagctcgttgtcggcggtaatggcctgaccggtggcgtgcttgccgttggccagccacgggtggatgccaaatgcccacggtgccttcacgctgtcgttgttgtgcacggtgaaggtttccgtgagaccgttctcgtcaagtgcataagtggcggtgatggtgatatcaaacgggtagccggcgatgtcgggggagcgccaggagagcgtcacgtgtgattcctgcaaatcaacgagctcccacatgtagcggtaggcatagccgtgcagggaggattgacggtcaaattcgtcgatcggcatctgatagtcttcaccgtcgaaggagtactgaccgttggtcacacggtttgggtacggtgccagcacccagccgttgcagcagggaatgaccttgttcgggtcaaagggaacgatgaggtcttcgccgcgccacttcagctcgcgcaggctggcgcccagttcggtgacgacggcactccattcgccggacgagatgacatattggttaccagtgcgaggcttcaaagccatagtgcacactcctttgtggaacaaattgttatcgctcacaatcgtatcgcataagtcccaagacgcggcggcacataaggataaaaaaattggctcccctctggaggggagccagcgtaacagaactacttctggactgcttcgtagcggaccacagtggtgtagtcgccgttgggggcgagcgtcaccaagtggtcaccagtgcggaaggcattggccggggcggtcatcggctcgacggcgatgccatacggatgctcggcgaacggtgcgccagtggcggtgtagcactgccaagcattaatcgtctcatcgccaatgattttcacttcgataccgtccgggcgggtgaatgtggtggtggtcgcaccatcggcggcacgctccacgtcaacccaggcatcatcaaaggcgcggccttcgagcgtcgggccatcgttcaggtcgtagatgccggtaaccggttcggtgccggtgggaatcagcgcctcgttcaccgtcacatgactggcggccttaatctgcaggtggcaggcggcggagtcggcatcgcgttcggcggcagttgcgccctgcttgccgttggccagccacggatgcaggccgagagcccacggtgccggctcgtcgccatcattgcgggcattgacggtcgcggtcatgccgttgtcgccgagttcgtatgtgacggtcacggtcacatcgaacgggtatccgtccaggttggggaagcgcagcgaaagcgtcacggcgctatcggtcaacgattcaagcttccacatgtagtggtaggcgtatccgtggttcgcattgttgcgcggtgcgggatgatattcgttaaccggcgcgcagtaatgcttgccattgaaatcgtattcgccgttttcgatgcggtttggccacggggccagcacataaccgttacaggtgggggtcaggtcgttgacgccgaacgggcagaaaatttccttgccttgataatcgaatcggcgaatcttggcgccgagttcgcagatgacggcggaataatcgccatagtgaatcgaatactgatttccggtgcgtggtgttttactcgtcatggaatcactcccgtagtgaggttggtgggccggtagctcctgctatcgctggccccagtctagcgcgtctcctctatcgaggcggggattggcgatatgcggcatataataaacaattcgtataaacacggtagcaatacgtggagtgacgagtctcacaccatcatgcgagaagcacgtggattccttggaaaccggtgatttgtgggagacgcggaaaagttgtgacggcagattcctgtaatccctgccttacactggaaaacactattgacgttcaggaggttccgatgaccaaaagcgttgtgctcgctgatccgcgaggcttctgcgcgggtgtggaccgtgcgattcttaccgtacagaccattctcaaagccgcggaggcttccggaaagcggacgcgcgaggatgggctgcccccggtatatgtgcgccggcagatcgtgcacaacaagcatgtggtcgaggacttggccgggcaaggcgcggtgttcgtccaggaattggcggagattccggatgctgctgcccaagcgggtattccggtggtgttttccgcccatggcgtatctccggtagtgaaggcggaagccgaacgtcgtggcatgcatatggtggatgccacctgccctctggtgggtaaggtgcaccgtgaggtgctgcgtttcgtgcgcgaggggtatgaaattgtctatatcgggcataaaggtcacgatgaagcggtcggtgtagtgggggagagccccgaacatgtacacttgatcgagcatgaatcggatgtcgattcgctggattttgcgcccgacaccaagctggtgctgctctcgcagaccacgttgagcgtggacgagaccgccgataccattgccgcgctgaaggccaaattcccttggattcaagagccgccgagttcggatatctgctatgccacgtcgaatcgtcaggctgcggtcaaactggtggcccagcagtccgattgcgtggtgattgtcggatcggccaactcctcgaattccgtgcgactgatggaggtggcgcaggagggcttgggggagcgcggcaaagcgtatcgcgtggatgatgccagcgagcttgacccggcatggttcaagggtctggaatccgtaggtatctcctcgggtgcctccgtaccggacgaactggtgtccggtgtgattgacgctctgcaaaacttgggcttcaccggtatgaagtccgtcgaaaccatcaaagaaaacatgcactttgtgctgccggcggagttgcgcaggaagaagtagtcattcttggctcccctccgtgaggggagccaagaacggtcaccacgtgccgattggtgcggcaacggcgttcaagaccttgagcaggtcctgtggattcacgcccacagacaggcctcgcttgccgccggagaccagaatttggtcgaattgcagggcgctttcatccaacacagtcttatgacgtgtcttctggcctaacggcgagatgccgccaaccacataaccggattcacgcatcgccaccttgggatcggccatagaggccttcttggcacctacggctgcagccaaggccttcaaatccatatgaccgctcaccggtaccacgcccaccacgcgttcggcaccggtgtccgccatcaacgtcttgaacacctgatgctcgtcgaagccgagcttggtggccgcctccacgccgtagccgtcatccatatggtcgttggagtgctcgtattcgtatacgtggaattccacgcccgccttctccagttggactgtcgccggagtggaacccgcgcccttatcatgcttgcttttctttgccatgattaccgttctactacgaagaaacccccgcacaaggcgggggtctcacagcttagttctcaaacgaaccgtagcggcctagaccgcagtggttcactcggagatctcagcgaagtacagcagggtacggatcatgttggaggtgaagccgtactcgttgtcgtagaaggacacggtgcgagccagggtcacgccgtcaatggtgttgacgtcggtctgggtcgggtcgaacacgccaccgtgggtgtcgccgaggatgtcggaggagacgatgccctcatcgttgtagccgtagtagtcggtgtcggagaaggcggccttgaaggcggcgttgatctcgtcggcggtggtctcggtgttcagcacggtggtcagctcggtgacggagccgtccggaacctggacgcgctgggcgtggccctgcagcttgccgttcacggacggaacgaccttgccgatggccttggcagcgccggtggagtgggcgatggtgttgatggcggcggcgcgcaggttgcggccggtcttggtgccacgcgggccatcgagcagcatctgggtgccggtgtaggcgtggatggtggtcatgaagccggccttgatgccgaacttctcgtccagcagcttgaccatggcggccatggagttggtggtgcaggaaccggcggagacgatcacgtcggaagccttgaggatgtcgtggttcacgccgaacacaacggtcggggtggtgtcatccttggccggggcggagatcaggaccttcttggcgccagcgttgatgtgagcctgggacttctcggcggaggtgtagaagccggtgcactcgagcacgtactcaacaccgtcgttcttgacccacggaatgttgttggcgtccttctcggcgtagaccttgtattccttgccgtcgacgatgatggagtcttcggtggccttgacgtcaaccggagtgccatcgtcatgacggaaggtgccgtgggtgctgtcgtacttcagcaggtaagccagggtagccggggtggtcagatcgttgatggcggcaacttcaatgtcaccagcctggccgccgcgagcctgcagctcgaagatgcgacggaaggcgagacgaccaatgcgaccgaagccgttgataccaatcttaactgtcatgtaattctcccttgtagggtggccttggcgcgctttggcacaccgggccattgtttaccaacagttgctactgtaatgccgactctgtacacatggcaacgtttcagcgtgcgttttgggcaaaaatgccgtattttctgtgagcgctcacaattcggattgcccgcaaccgacatgtgatttttcctctcctttggaggaatgtctcgaatcatcatgagcaagcgcgcggcatgcaagtcagcgaaccagcagcttggacactgcggtgtccagctcgccgatatcgccgccaaattcgtggaatcgactcacctgaggcaacgccacctcgatggggaaggtgacgatcagtgtgccgtgctccacgctgatggccgcgtccacgccgtcgcggaactcgttgctgaccccctgcaccaccgtattggtcagcgtgccgtctttaagctcatatttcagccccggctcgttcacgccaagcgaaacatcggagtgggagaacgcagacaccatgcggccgtcctcgggcaccggatgcgcggggaacgaaagcctaccatcggtgatggccgtgacgatgagcccatcaccatacagatacccgcttgccccatgccgggccaataatgccatcagttgaatgccggaaatcgtatggtcgatgcggccgcccaaaccgccatagacatggaattcgcggcaacccgccgaccaaccgaccttcagcgcggagagcatgtccggatcgtccttcagcgcgggcagcgcgatggtgcgcacatcggtgcggggcggccggccctccagcgaatcgaagtcgcccaccaccacatcgggcacgatacccaactggcgcgtatggtcgagcccgccatcggccgcaatcacatacgcgccggccggcaccacgggcgtgcccgcatagtattcgcccgcaccaaaaatcacgcatacctgagtcatgatgcctactgtagccggtatccacccatcgacacacggtccgcgaatgtccgggcatgtggtaaacttcctatttggcttgagaaatcaagaaagcggggcaaccccacctggaagcctttcaaggcctcgggttcaaggcaaacagcctagcgattgcgatatacaacgcgtaatcaggaatgacgcaaagaactgatatgcgtctgcagaagctgagcgcatattggcgcgggctttggcttgccatgaacccaaagcattgaacaggactccagcaaaggccctcgccacggaattgaagtagaggattggagtcatcatcagcgacgaaccacgtattaacgacgagattcgcgtcccgcaggtacgcctgatcggcccgaagggcgagcaggtgggcgtcatcgcgacttccgtcgcgctgaacctggccaaggaggcaaacctcgatctcgtcgaggtggccccgaacgcgaagcctccggtcgccaagctcattgattacggcaagttcaagtacaacgagaagatcaaggctcgtgaagctcgccgcaaccagagcaccgcggaaatcaaggagattcgtttccgcctgaagattgacgaccacgatttcgacgtgaagaagggccatgtgacccgcttccttaacggaggcgacaaggtcaaggtcaccatcatgttgcgcggtcgtgagatctcccgcccgattggtggcgtggaactgctgcagcgtctggccgacgatgtcgaggaatacggcaccgtcgagtccaagccgaagcaggagggccgcaacatcatcatgacccttgcgccgaagggcaagaaggtgcacacccagtccgagcagcgtcgtcgtggcgccgagtcccgcgccgagcgtcaggctcgccaggcggctcgtctcgcggccaagcaggagtctcaggctcaggccgcggccgacgcgcagtccgtgatttctcagaagacttccgacaagaagcaaaccagcaaggagggcagcaatgccgaagatgaaaactaattccgccgcttccaagcgcgccaagatcaccggcaccggcaaggtgaagcatgtcggttccgccatgcgccacaacctcgagcacaagtccgctcgcaagcgccgtgaactgtccgccgacgatgtgctgcgcggcggccaggccaagaagctgcaccagcttctgcagaagtgagcatagggcttacccggaaataacaagactttagaaagctgaggaatagattatggcacgtgtcaagcgcgcagtgaacgcccacaagaagcgtcgcgttgttctcgagagggcttccggctaccgtggccagcgctcccgcctgtaccgcaaggccaaggaacagctgctgcactcctttaactacaacttccgcgaccgcaaggctcgcaagggcgatttccgcaagctgtggatccagcgcatcaacgctgccgtccgcgctgagggcatcacctacaaccgcttcatccagggcctgcgtctcgccggcatcgagctggatcgtcgcgctctggctgagatcgccgtctccgacccgaacaccttcaagaccatcgtggacgccgccaaggccgccctgcctgaggacgtcaacgctccggttgaggcctgattgcttgaagtcgtgacttcacactagaaaccccgcttccgagcggggtttctttgtaccatgggcactatgaccaacggattcaccagactcaccgagcagttcctcgtccacatcggcgtggagcgagggctcgccacggccaccgtcaccgcctacgaatccgacatcgccaaatacattgattggctcgaaacccgcggcatccacgaaccggacgccataaccaaacaagacgtcgaagactacatcgccgcccttgaccaggcgggggagtccgcccgctccaaagcccgaagactggcctcgatccacgaattccaccgtttcgcgctcggtcagcacgcggtgacggcggatgtttcggccgcagtcaaggcgcccaaaggcgccagcaccctgcccgacgtactcaccgtggacgaggtaacccgtctgctcgacgcggcggcagtcggcggctcaaccgatccggtggtattacgggacaaggccctgctcgaattcatgtacgccaccggctgccgcgtctcggaagccaccggtgcgaatctggacgacatcgacctggacaagcacatcgcgcgactcatgggcaagggctccaagcagcggcttgtgccattgggcagttacgcatgccgggccatcaccgcatacctcaatgcggggcgtggcgagttggaacagcgctccagcgccaagattcccgagaggcgcgcactgtttctcaacaaacgcggcaagcgcatctcgcggcaatcggtatgggaaatcgtcaaagcaaccggggagcgggccggcatcaccaaaccactccatccgcacaccttgcgccattcctttgccacgcacctgatccaaggcggcgcggacgtgcgcaccgtgcaggaactgctcgggcacgccagcgtgaccaccacgcagatctacacgcacgtaagccctgaaaccctgatcgaaacgtatctgacctcacatcccagagcgcggtgagacacaccattttgcgacgcgtccgcccatagcggaatcgcggcgggggagcaccaaagtcggccggaaattcaaggcgtgacaatacagtacataacagcgaaccgtcagccaggaagaggtattcatgctgcagatcaaatcgatctcgaagcgctataaaaccggtgatttcgttcagcaggcgcttgacaaagtcagcctgaacctacgcgacagcgaattcgtcgcgattctggggccctcgggttccggcaaaaccaccttgctcaacatcatcggcggcctcgaccggtatgacgacggcgatttggtgatcaacggcatctcgacgcgccaatacaaggatcgcgattgggattcgtaccgcaaccacaccatcggcttcgtgttccagagctacaatctgatccctcaccagacgattctgtcgaatgtcgaactcgcgctgacgatttccggcatcggcaaggccgaccgtcgcgagcgtgcgcgcaaggcgctggagaaggtcggactcggcgaacatatcaacaagaagccaaaccagctgtccggcggccagatgcagcgcgtggcgatcgcccgcgcactggtcaacgacccggacatcgtcctggccgacgagccgaccggcgcgctcgattcggacacgtccgtgcagatcatgaacctgctcaaggacgtggccaaagaccgcctcgtggtcatggtcacccacaaccccgaacttgcggaacaatatgccacgcgcatcgtcagcctgcgcgacggcgtgatccgctccgactccgacccgttcgtcgtggacgagacggccgaacagccggccgtgtacaagacgatgggccgcgcgtcgatgtcgttcgccacgtcgctggcgttgagcttcaacaatctgaaaaccaagaaggcgcgcaccctgctgacctcgttcgccggctcgatcggcatcatcggcatcgcgctgattctatcggtgtcgactggcgtgaacacatacatcagtgacatccagcgtgacacgatgaccgcctacccgatcaccgtcgactcccagaccttcgacctgagcagcatgatgggcggacagatgggcggcgatgacggatacggtggtaagacgcacaaaaccgacggcatctacccggacgaccgcagcgtcaagcaggcgtccagcctgaccagttcgattaccgaaaacaatctgacccgcttcaagaaatacctggataattccaagagcgagattcaccagtatgtgggttccaccggcatccagtacacgtatgacgtgaaattctccgtgttcgaccacgaccccgatggcacgctggtcaatgcggacggcgtgacgatcggtgccagcgattccacttcaatggcctcgcagatggcgtccacaagctcgtccggcatgtccggcacctcgtcgatcacctcgcagcagatgtcgatgctgaccggcaaaaccgatgagaacgccgcgcccgactcgttcaacgagatcatgccgggggcggacgacagcaagctcgtaggcaaggtcatcaccgacaactaccaggtggtcaacggttcatggccgaagtccaaggacgaggtggtgctggtgcttgacgacaacaacagcgtgccgctgaccacgctgtacgagctcggcctgctgcccgcctccgattaccacgagatgatgtccaagcttaacgccggcgacaaggtcagcactccacaagacaagatcgactatgctaaggccctcgatcagacgctgtacatgattccggcatccgaccagtacgtcaagggcgatgacggccactaccgtttcatcggcaacgacaaggacgaaatcgaacagcgcctcgaaacggccaccaaactcaaggtggtgggcgtcgtcaaggcgaagaaggatgcttcggccacgccgttggccgctggtgtggggtacacgcgcgctctgaccaatgatttgatcgaccgtgcggcctccagcgccatcgttaccgatcagaaggccaacccgaacacgaacgtgctcaacggcatgacgttctcgccctcggacgatgccaccaaggtggccgacgcgcgcacctacgtggcttcgctgggcgtgacgcagaaggcgaacatggccaagtcgatgatgagcgccgggcagcagtccggcacgggcgcatcggacgccgctggtgctggtgctgcaggtgtcgctggcgcggcgggtgccggcgatcaggccgccgccatggccgcgatgagcgaacagcagctcgccgacagtttcgacgcgtatatcgccacggcttcgaacgacgtgcttgtcgcgatctacgaccagtacgtgtcgaccggcacctacgacgacaacctcgccgcattcggtgtggtgagtcgtgacgcgcccagctcgatcaacatctacgccgacagcttcgaagacaaggaccacatcgccgacgcgatcaccgactacaacaacaccgtctcgaagaaagacaagatcacctacacggattacgttgggctcatgatgagttcggtgaccaccatcgtcaacgtgatttcctacgtgcttatcgcgttcgtgtccgtctcgctgatcgtctcctcgatcatgatcggcatcatcacctacatttcggtgctggagcgcaccaaggaaatcggcatcctacgcgcaatgggtgcctcgaagcacaacgtatcccaggtgttcaatgcggagaccggcatcatcggcctatgctccggcctgttgggcgtgggcttgaccgtgctgctcaatattccgatcaacgccgtgctacaccacttcatcggcaatgcggacgtcaatgccgccctgccggtgaccggtggcgtggtgctggtgatcctaagcgtggtgctcacgctgatcggcggcctgattccctcgcgtaaggcagccaagcaagacccggccaccgcactgcgcaccgagtaagcgcatcgacatagtacgagacgagatccataaacctcggaacactggaataccagcggcaaaacggtgttccgaggcgagcccggcgagtacattaggatgggcgagcaggtattcccgacaaagggggcgagggcaacgatggacgactggcgagatacccgcgataaagacagcgcattccgtcaaggaacgctgcctatgacaggaacgtatgtcgttgcacccccagcgaacccggatgttgataaggtagacagtatgcctaccgatttgcttggacgtgaatacgaaaccttccccgcacccgaaccgctgcaacagcacggtccggcgcgtgtcattgccatgtgcaaccagaagggtggcgtaggtaagaccaccagctccatcaatattgccggtgcgttggcccagtatggccgccgcgtgcttatcgtcgatttcgatccgcagggtgccgccactgtgggactgggcgtcaacgcgaataccgtggagaacacgatttacaccgcgctgttcgatatttccgtggacccacatgatgtggtgcagcacaccgcattcgagaacatcgatgtgattccggcgaacatcgatttgtccgccgccgaggtccagctggtcaccgaagtgggccgagagcagatcctgaacagcgtgctgcgcaagctcaagtcggaatacgatctcatcatcgtcgactgccagccatcgctcggcctgctcaccgtgaacgcgcttgccgcagctgatggcgtgatcattcccgtggccgccgaattcttcgccttgcgcggtgtggccctgcttatgcagtccatcgaaaaagtgcagtcccgcatcaatcccgcattggaagtggatggcgtgctcatcaccatgtacaccaagacactgcactgcgaagaggtctgccagcgcgtttacgaggcgttcagcgaaaaggtgttccacacgttcatctcccgctccatcaaactgcccgattccacggttgccgccgcgcccgtggtggtctatgcccctgagcacaagacatcaaaggaataccgtgaggtggcacgtgagctcattgctcgcggcatcgtggcgtaacgattgtttcgataaacgatgaatgagacttccctttctcggctcccctctctgagggaagctggctcgcgtagcgaggctgaggggagctccgcggaagccgaaatcagcacggaggaatccgccacttccggcttccgggtcaacctcgaagtctattccggtccgtttgatgccttgctcggcatgatcgccaacaacagactcgagctgaccgaagtttccctctcctcgatcaccgaggaattcctgacatacgtgcgcgggctcgatttcacaaaaaacatggatgaggccagcgcctttctcgatatcgcctctattctggtcgaggccaaaagcgtggcgattctgcccggcggcgaagacagccagcacgacgagcagagcctcgaagtgctgcgcgaacgcgatttgctgttcgcccgactcctccaataccgcgcctacaagcaggccgcaggtgacttccgggcgcgtatcgccgccaactccggccgattcccgcacccggcggccatggacgagggcgttgccgccatgctgcctgagctggtatggacgctgactccgctcgaactcgcccgactgaccgcccaggtcatcgccaacgcgcccgcctccgaagtgtcgatccatcagctgcacgtgccgttggtcgatctgcgggcccaatcgctggtggtgcgcgaccggctgatcgcggcattggaatccaagggcgaccagtcgatatcgttcagcgaattgacccgggactgcacttctcgtattgaggtggtggctcggttcatggccgtgctcgtgttcttcaaacaaggtgtgctgcagtatcagcaagatggtccgtttgccgaactgcacctgaggtgggtacccggcgtagccgaaacgatgagcgacgtgaacatttccgaaggtgattttgcgtaaggacggcgattggtgactgaacagattgacgcaacgaatacaaccgaacacatggcggatgccgaatcgacggctgaatccgcaaaggccgcggtgaggggagtggaggagacgcaccccgaatacgtggatttcgcggtagacgattttcccggcgggctgcccgcctgtctggaagcgattctgatggtcgccgaccagccgcagaccgccaccgagctggcccgtattttggcattggatcgcaacacagtcgaagaggcattgcgagtcctgcacgatgactatgagggcgatgaatcccgtgacatccgcccgcgcggcttcgaactgcgccgcaccgctcgtggctggcagttcgccagtcgcgccgcgttcgagccggtcgtctcatcattcgtcaccgacggccagactgcgagactcagtcaggccgcactggaggcgcttgccatcgtggcctatcgccaacccgtcacccgagcccaagtggccgcgatccgcggtgtcaactccgatggagtgattcgctcgctcacggtacgcggccttatcaaggaagacggcgtggaccccgaatcccgcgcggccctcttggtcacctccgaattcttcctcgaccaaatgggtctgaagagtctcgacgaactaccctccctagcgccattcctcccgtccgtcgccgaaatgacacagtcgaaatcggaagatacggacgtgatttcgtagcgattggggcccgctgcctgaccaatattcgtgcgctagaccatccgatatgtgatttatggtcattgtgactataagtagtgctatgctctcaatgcagggagaacaaccggtatggaaagaggcatggcatgggattcggcaatgtgtccgagcgccgcagcgcaccgccacaggtcggcgtgtcagtggtgattctggcactcggcccggaaggcgataccggcaacagtgccgccgattccggcaacgccgcgaactcggcccattcccgtctctggttgcccctggtcaagcgcgtccgtcagccgttcctgggctgctgggcgttgcccggcggtgacctgcgctccgaccggtcgttggaacagtctgcctacgcggccctcgaatcgaccacagacctgcacccgcgatacctcgaacagctgtacacctttggaggcccgacccggtcccatggcggattgcccatggtatccgtcgtgtactgggcgctcgtcggccagaccgaggccgcgggcttcgaggacggtgacaacgtacgatggttccccgaagacgaactgcccgagctggcgttcgaccatcgccagatcatcgactacgcgctgctccgcctgcgctccaaaatcgaatactccgacgtggccacccgactgctcggccccacgttcaccctgcgccaactgcacggcgtctatgaggcgattggcggcgaacccctcgacttggcgaacttccgccgcaaaatgcttgcctcgggcgaccttgaagacaccggggagaagatgcgtgaaggccgccaacgaccggccaccgtctaccgctacatccccaaacgacctgtcgagaacggtacgccccacgaatccgatggcgacgacatcatggaactgtccagacaaggcgagcgtgaagacgctctcgacgcgctgatcccatccgcgcgcatctgatttttcccgccgacccgattcgggccggcatcacagacgtatataggaaaggaaccactatgactgcactattcactgcgccgtccgttgacgagatcatcgccaagctgggcgcgcaaagcacctgcgatgcaggactgacccaggacccatggcacttcgacaccaccacacccagctacggtcccggtgcctcgatgctcgaccgtctgcccgccaacgcgccgcgccagcaggtgctgccggacgaataccgcaaggcctccgacgaggaactgcagcagcgcatctccgacgccaagcagcgtctcggctccaaactgttgattctgggccacttctaccagcgtgacgagatcatcaagcacgccgatttcgtgggcgactccttccagctggccaagaacgccaccgaacgcccggacgccgaccacatcgtgttctgcggcgtgcacttcatggccgaaaccgccgacatcctctccacgcccgaacagagcgtgaccctgcccaacctgtctgccggctgctcgatggccgacatggccaatatcgaccaggtccaggaatgctgggaccagctcggcgagatctgcggcacccagccggactccgatggcttgcagcagatcatcccggtcacctacatgaactcatccgccgcactgaaggcgttctgcggacgcaacggcggcatcgtatgcacctcttccaatgcgcacgccgtgctggaatgggcgttcgcccgcggcaagcgcgtgctgttcttcccggaccagcacctgggccgcaataccgcccgcgccatgggcattccgctgagcgagatgccgctgtgggatccgttcaaggcacagggcggcgccgccgatccggccgattacgcccgcgccaagatgattctgtggaagggcttctgctccgtgcaccagcgtttcaccgtcgaacaggtcgaacgtgcccgcaaggcatacccgggcgtcaaggtgatcgtgcaccccgaatgctcgatgcaggtggtcgatgccgccgacggtactggctccaccgcgtacatcgtcaaggagatcgccaacgcgcccgccggatccgccattgcggtgggcaccgaaatcaatttggtgaaccgtctggccgcgcagtacccggacaagaccgtgttctgcttggaccccgtggtctgcccgtgctccacgatgtaccgcatccacccggcctacctggcttgggctttggagaacctcgaagccggcaacgtggtcaatcgcatcaccgtggacgaagacaccgcccgcgaagccaaggtggcactggagcgcatgctgcgcgttcacccgtgatccatccctgacgcccctcgtacatgaggggagctgtccgcgtagcggactgaggggagcagatgacgcaaaaacagaggaaagcaacacaatgagcaacactgaaatcgtcgtcgtgggcgcaggcgtcgccggactgtccgcggcactggccgtggccggtaccggacacgacgtgaccttggtaaccaaggccgaactggtggaatcaaacacctatcatgcgcagggcggcatcgccgcggccatcttctccgacgacgacccgaagctgcacgccgccgacaccatggccgcgggccacggcctgtgcgacccgaaggccgtggacatcctcacccgtgagggtgcggagcgcgtccgcgagttcgccgcggccggcgtccacttcgaccgcgacgcgcatggacacatgctgcgcggcctggaagcggctcattcgcgcgcccgcgtggtgcatgccgggggagacgccaccggcaaagtgtttgaactggacgtctccgccatggtgcgcaagaacccgcgcatccacatcatcgagaacgccttcctcaaagatctcatcgtgcggggcggccacatcgccggcgtccacctgctgatcgacgggcaggacaaggatctggccgccgaccgggtgatcttggccgccggtggagcaggccgtatgtacccgtacaccaccaatccgccggtcgccaccgcggacggcctcgccgtcgcatggcgtgccggtgcccaggtcgccgatctggagttctaccagttccatcccaccgccatggccgtgggcgagcacttcctcgtctccgaagccgtgcgcggcgaaggtgcggtgctgctggatgagcatggccacaggtatatgaaggacatcgatccgcgcgccgaactcgcgccgcgtgacgtcgtggcccgcgagaacttccgcgtgatgcaggcgcaaggcggcaagcccgtgatgctcgacgtctcgccgatggcccgcgagaaccccgacctggccagcttcttggcccaccgattcccgaccatcgacgcctatacgcgttcgcttggcttcgactggagcaaggagccgattccggtggcgcccgccgcgcactactacatgggaggcattcgcaccgatctgaacgcccggacctccattcccggcctgtatgcggccggcgaatgcgctcgtaccggtgtcatgggctccaaccgtcttgcctccaactcgctgctcgaggggctcgtctacggacgccgcgccggtctggccgccgtcgcggacggtgacgacgcggtctgggcacccgaaccgttcctgaactccgccaccggtgccgtgttcgaccatgcgccgatcgcgctggccgcccctgccgctacggctgctgctgacgataccgccgccgacaaggtgtggaatcgtacccgcatccagaacaccatgtggcatggcgtcggcgtgctgcgcgacgaggccggactgaaaaccgccatcgccgaactcggccaaggcctcgccgccgcaaacgcccaggctgatgtaaacgccgatggtgctgcaagcagcgttgaggctttggagaaccgcaacatgctcaccgtaggctatgtggccgccaccgccgcgctcgcccgcaccgagtcgagaggcgcccacgcccgcaccgaccacagcgagccagtcgacaactgggcccactccgtcgcctacatcaaggactgacccatgctcacatcacacatcatccgcgtcgccgtcgaagcggcgctcgccgaagacgcgccctacggcgacatcacctgcgagaccaccatccccgcggacgaaaccggctcggcccacctcaccgcgcgcgaaaacggcgtgatgagcggcatcgacgtgttcgccgcagccttcgccgcacagaacccggccgtcaccgtcaccgccgccatcaaggacggcgagcgattccagcgcggccagatactcgccaccgtgaaaggcccggtacgcgacctgctcaccgccgagcgcatcgccctcaacttcactcagcgcatgagcggcatcgccaccatgaccgccgccttcgtggacgcggtgaacgccatctacggcgatgattatgacggacccgtcacccggccgcgccgctacgagcgcacccgcatcgtcgatacgcgcaaaaccacgcccggcctgcgcccgttcgagaaatacgccgtggtctgcggcggcggccacaaccatcgttacggactgtccgacgcggtcatgatgaaggacaaccatctggcggcgctcgccgcgcgcggcatcgacctggccggcgcgatccgccacgtgcgcgaacaggtgggccacaccacgcatatcgaagtggaagtcgaccgccttgaccagattcccgccgtgctcgccggcggagcggacaccatcatgctggacaatttctcgctcgacgacacccgtcgcggcgtggagctcatcgacggtaaggccatcgtggaagccagcggcaacatgagcctggagcgagtgccagccgtggccgtcaccggcgtggacgtgatctccgtgggcgcgctcacccactctgtgcgcagcatcgacctcggattggattggaactagtcatggccgatacccccaacgcatccggtgaacccggcgaactgtacctggacgccgccgccaccgaatcagtgagcccggcagtcatcgaggccatgaccccgttcctgactgaggcctacgccaatccggccagcgtgcaccagcccggcaaaaccgcggcccgcgcgctggacgcggctcgcgcatcatttgccgcggcattgggcgcccggccggatgacgtgatcttcacctcaggcggcaccgaatcggacaatctggccatcaaaggcatcgccatggcgcgcatgcgcaaactgggcttgcggccggtctgcggattcgccgaagccgatggcaaacagccggcaaattgtcgcccgcgcattatcatttccgctatcgagcacccggccgtggcccaatcggcggcatggctgcacgaatggttcggtttcgaagtcgtgcgcattcccgtggatgcgcaagcacatctcgatctcgacgcacttgaacgcgagctcgacggcgaggccagtgaacgtaccacgatggtctccaccatgctggccaacaacgaggtcggcaccgtggaacccgtggaggaactggtccgcatcgcccacgcgcacggcgtgcccatccatgtagacgccgtacaggccgccgggcagattccgattcgttttcgtgactgggatgtggacgccctgtccgtatccggacacaaattcggcacccccaaaggtctgggagcgctgctggtacgcggccgcacacccatcgaaccggtgctgtccggaggcgggcaggaacgcggcctgcgctctggcacgcagaacgtggccggtgccgtggcgctcgccatcggactcaacgaatcgaatgcgcgcatgcaggcgcagtaccgtgagttggtcgcgtcccgagacatgctcatcgacgcggttcgccgggtcgcgcctcgcgccgacctgaccggcgaccccgaacgccgtctgcccggtcacgcctccttcatcttccccggcgtcaccggggaagcgctgctcgtcgacctggacgcgcgcggcatcgctgcctcatccggctcggcctgcgccatcgggcgccacgagattcctgccacgttgctggcgatgggcctcgaaccgtccatcgccaaatcggcattacgcatgaccttccgcaagccgctgacccgcgaacaagtcgaacgcatcagcttggccatcgaagagtcctacaccgacctgacccgccattaaatctgacgccacttaccagaaaggaaacgacgtgagcaccaccacttcagcgcaacccgcgcagctcacccgcaacgagcgcctcgaccggctgcccttcaacaaggcgcaccgcaaactcctcgtcgcctccggcatcggctgggcattcgacgccatggacgtcggcctcgtctccttcgtagtcgccgccatcgccgccgacccgcacttcaacctcaccccgaccgaaaagtcatgggtgctgtccatcggcttcgtcggcatggccatcggcgcggcagtgggcggcttcatcgccgaccgcgtgggccgcaaaaccgtgttcaccgccacactgattatcttcggcatcgccaacggtgccatggccctatcttggtcactcggcatgctgctcggcgcccgactgatcatcggactgggcttgggcgcggaactgccggtcgcctccacgctggtctccgagttttcgccgaccaaacagcgcggccgcatgactgtgctgctggaatcgttctgggccgtcggctggatcgtcgccgccatgatcggctacttcgtgatcccgaacaccggcgactggggctggcgctgggcgctggccatcggcgcgctgccactgctctacgcaatcgtcacccgcgtgcacatcccagaatccgtgcgattcctcgaagccaagggtcgcgaagacgaagccgaaaaggccgtgcgctacttcgaggaagccgggggagtagccccggtaacctctcccaagggcaagccgctgccgaagatcaagacgcgcgaactgttcggctccaagtacctggcccgcaccatcgccatctgggccacgtggttcttcgtgaacttctcctactacggcgcgttcacatggatgccgtcgctgctcgccgaccagttcggctccctgaccaagtcattcggctacacgctcgccatctccatcgcccagctgcccggttacttcctagccgcctggctggtggaggtctggggccgccgcaagacgctgagcatcttcctggccgtctccgccgtggccgccttcgcgttctcgcaggccggatctgtggccctcgtgctcgtgttcggcatgctgctgtccgcctccaacctcggtgcgtggggcgtgctgtacgccgtgaccccggaaatctacccgacccgcctgcgtggcgcggccgccggtgccgccgcagcggtgggccgcatcgccgccatcatcgcgccgctcctcatgccgtggttcctgaccctgtccggcggcaacaaggccgtggccttcatcatcttcgccgccgccttcatcatcgcctgcgtcgccgccctctgcctgcccgaacgcaaaggcctcgatctcgaagactgacggaagtcgatgacgggagaacagatatttgcctgattaccggcagaacccccgcgtcccggcgaaagggacgcgggggttctgccgtttgaaggccgtaaaaacggcagaaatcccgcgagggggtcgtcgagacgcgggagttctgccgttgtgaggtgcttttctatgttccgacatagtcaaggtgtgcgagtatcatcgtgacggtttgtgtgtaggtatgaataaacacctcagagtaagtacttaagtactcgagaacgcaagtaccgaacgattacgcaaaagaatcagtattaagagaggtttcgatggcggttcgtggagatatccgtaatgtggcgattgtggctcacgtcgatcacggcaagaccaccctggtcaatgccatgcttcagcagtcgcacgtgttttccgagcgtgaggaagtgccggatcgtgtaatggattccaacgatctggaacgcgagaagggcatcaccatcctcgccaagaacacggccgtggaatacaccggtccgctggccgccaagtacggccacccggagggcatcaccctcaacatcatcgacacccccggccacgccgatttcggcggcgaggtcgagcgcggcatctccatggttgacggcgtcgtgctgctcgtggacgcctccgaaggcccgctgccgcagacccgcttcgtgctgcgcaaggccctcgaagccaagctgccggtcatcctgtgcgtgaacaaggtcgaccgccccgacgcccgtatcgaagaggtcgtcggcgaaacctccgacctgctgctcggcctggccgacgacgtgcagcacgagggcatcgacctggaccttgaccagctgcttgaaatgccggtcatctactgcgccgccaaggccggctacgcctccgtgaaccagcccgccgacggtggcctgccggacaacgacaacctcgagccgctgttcgaaaccatcatctccaccatcccggcccccgaatacgaggagggcgccccgctgcaggctcacgtggccaacatcgactcctccgacttcctcggccgactcggtctggtccgtatctacaacggcacccttgagaagggcaagacctacggcctgtcccgtgtggacggctccctcgagaacttccgcgtctccgaactgctgcgcacccagggcctcgagcgtatcccggtcgaatccgcaggccccggcgacatcgtggccgttgccggcgttaacgacatcatgatcggcgagaccatcgtcgaccccaacgacccgaagccgctgccgctcatccatgtggacgatccggccatctccatgaccttcggcaccaacgactccccgctggccggcaccgagggcaaggaccacaagctcaccgcccgcatgatcaaggaccgtctggaccgcgagctcatcggtaacgtgtccatcaaggtgctgcccaccgaccgtcccgacgcttgggaagtccagggccgtggcgagctggcgctggccgtgcttgccgagcagatgcgccgcgaaggctacgagctgaccgtcggccgtccgcaggtggtcaccaagaagatcgacggcgtgatcaacgagccgatggaaaacaccaccatcgacgtgccggaagagtacatgggtaccgtcacccagctcatggccgaccgtaagggccgtatggatggcatgaccaaccacggctccggctgggtccgtctgcagttcaccgtgccgtcccgtggtctgatcggcttccgcaccgcgctgctttccgccactcgtggcaccggcatctcctcctccatctctgccggctacgcgccgtgggctggcgccatcaccattcgccagaacggttccatggtttccgatcgcaagggtatcgccaccccgtacgccatgcagcgtctgcaggcccgtggcaacttcttcgtcgaaccgcagtccccggtgtatgaaggccaggtcgtgggtgtgaacaacaagcccgacgagctggacgtgaacatcacgctggccaagcacatgaccaacatgcgttcctccaccgctgacgtgctcgaaaccctgaccccgccgatcaagatgagccttgaggagtccctggacttcgccaacgaggacgagtgcgtggaagtcaccccggagtccatccgcgtgcgcaagatcatcctcggccgtgaggactggtacaagtggcgcgccaagcagcgccgccagaacgccgcccagcagggtaagtgatttggtgcggctgtagccgaccattctctctagctcccctctctgaggggagctaagtttattcctcaccaagtcatatccccacctatactgaaacgcatgactgtgaagagcactactgaattgcgtccgtggtcgtatcgccagaacgcgctggtcaaatcgttgatcacgattgcggcgggcgtggcttccgcctttgtgggcacgttcgcccaccgtatgggtgcggaactgaatattccgtatggtctggtgctggcgtttctgctgatcggcctatcgacatggtgcgcccgttcgcgcatgggcgcggtcggactggccctgcacctcatcgcctcctcactgaccgcatggggcatggcgctgaccaccacatccggcaaagcgctcatcgtcgccggattccaaggcgacatgccgttcttctcccaacatgccggctacatctggctgtacggcctgatactggtccaagtcgtcctgctcattcttcccgcccgctggttcgtcattcccactcattctgaatcgcgcgcgtaactatatatggcgatacattcccgggaatgcgtcgcgtatcagcgggcgtaggggattacggccgctaccatagaactttatggcacgcatgaaactgttttacttgggcccggagggcaccttcacccatcaggcggcaatgacggccgccgaccagttcgccacactcggcgacttcgacctcatcgctctgcccgacgtgcccgcgatcatgcaggccgtacagtcgcgccaaggctggggcgtcatcgcatgggaaaacaacgtcgaaggctatgtggtcccgaatctcgacgcgctgatcgacgcccccaacgcggccggcttcgcccggatcagtgtggacgtggccttcaacgccttcaccgtgcgcggccacagcatctacgactgcaccggcaaccccgtcagcgctcacccgcacggtctggcccaatgcacccggttcatcgccgaacaccatttgcagcccgaacccgcatcctccaacgccgccgcctgccgcgacctgaagcccggccgcgtggcgctcggccccagcatctgcggcgaactctacgatctcgacaccctcgccgaacatgtgcaggatttcgatggcgcgcacaccgaattccttgtcatcgccccgcgtgatgtggtccaggaactcaacgcccgcgcccacagcaatgacgccggcgacttcgaaaccatcatcaccttcatcccgctggtcaccggccccggcgtactcgccgacctgctggacgtcctgcgcgatgcgggactgaacatgaccagcttcatctcgcgcccgatcaaaggccacgacggaacctacagcttcatcgccacccttgacgccgccccctgggagccgagattccgcaccgcactggaagagatcgccggacacggcgactgggcaaaaaccctggccgtctacccacgccgcgaacgcccgaacccgccggtcgacgcctggatgctgcccgagggcggcgtccacatcaccaatcgcgcgccggaaggctggcagtacaccgaggaagcaaggaaggaactgctgtggtagatacagtcggaatcgtcggactcggattgatcggcggctcgctcgcacgccgcctgaccgagcgcggcgtgcgcgtcgtcgcgtggaaccatcgcccgcacccctacgcccaggccgaagccgatggcattttctgcaagagcacgctctccgaactcatggatgccgagccggatgtggtcgtgctgtgcaatccgctcaaggcgatgcccgcaatcctcgccgccctggccccgctcatgggcgaccatccgaacaccacgctcaccgacgtgggctcggtcaagggcatggtccgcgatcaggtcaaggctgccgggctggggaagtgctacgtcggcgcccatccgatggccggcaacgaactgtccggctggcaggccgccgacccgcatctgtacgacggtgccctatgggccatcaccgtggacgagtccacgggctaccgccgcttcctcgacgtcgccgcgatgatcaccaaggacgtcggcaaccgcgtcatcgtcgtggacgacgaaacgcatgacaaggccgcggcgatgatctcccacatgccgcatgtggtgtccaccgcgctgatcaacgaactggtcgccaacccggaccgcaacatcgccgccgcgctggccgccggctgctggagggacatgacccgcgtgtccctgaccgacccggaccgcacgcgcgcgatggtcgaggaagactcgctgaacgtcgaagcgctgctgcgccgcatggcggcacgtctgaccgatatggccgaccaactgcacgctggtgccgccggcgagcaggatgtgatgggattcttcgccgaaggcgaccccttccgccggtacaaggccgccgtgacacatgccggcatcaccgctgcacaagacggtacggccaccgctgcgccgcaagccggcacaactgccgccggattcccggaacgcgagctcgccgtccccgaagccggctggcagcagaccctgctgttctccgcacgccgaggagaagccatcaccggcttcgtccatccacgtcaggccatcatccaactgcgccccgccatgtaactgcgtaccgccatgtaggcccgtgcgcaggttcccctcgccgcctgtcacgaagaaggccgcgcgagggggatgaagttcccgcttgttttcgtgagaagaccgtgtggctccgctgttcgaaaggcccaaaggagtaaggtagtctgtaccgtttttcgggaaacgcatcgaagttgatgcggcgaatggttaagggggatgatgacgtatgacgttaccaaggcagattccggccggtgcccgcgtggtggtgcgcatcaccgatggcattgacccggtcgaccaccgtatgaagttccgcgactatgtgggtcacgtggtttcctgggacggatacacgttggagatggtgcgtgacgccgccgccaatggttcgcgcccggcccagaacgtgaccatccatcaggaacagattgccacattgaaacccgtgccggagcggcgcaacacgccaccccggccgtaacccaaggccataaagaattcggaggagaacgagagtgtcatctacgcagttcgacggcgatatcgactccttcgtctcctatctgaagtccaaccgcggcctgtcagcgaatacgctcaaagcgtatcgcgcggatctcacggcatgcctgcacctgttcgagctgcgcggcgtgaccgatctgaacgagatcacgctggatgatctgcgtagctggatggcggtggaatcgcgcgatcacgcccgcagcagcatggcccgcaaaaccgtggccgtgcgcgggctcttcgcgtggacctatgagcatgggctgaccaccaccgacccggccgccacactgatgactccctcgattcccagcacgctgcccgcggtgctcaccgaatcccaggccgagcaattattggatgtcgctgaacatgccgttgcaacaaaccagtacaaggacgatgggggagcggcagccgcgtccggcagcggcagcggcaaggcagctgataagtcggccgataccgtaaaccgcagtgaggcacccgcccgtgcagacaagcgcgacaacgcccgagtcaccgccgaatcgcagcgcaacgccgcgattctcgaactgctgtatgccaccggcatccgtgtcgccgaactggtgtcgatggatatcgccgacatcgacttctccaatcgcaccatcaaagtcaccggcaaaggcaacaagcaacgcgtggtgccgttcggactacccgcccagcgtgcgctggagacttggctggaacaggggcggccggtactggcccgtacggcaacggatgcagtcaagtcccgtgctgccaacgccctgttcctcggcgcacgaggcggccgtatcgaccaacgcatagcccgtgacatcgtgcacagagcggcccgagaggccggagtgccggatatcagtccccacgccttgcggcattccgcggccacgcacatgctggacggcggcgccgatttgagggaggtacaggagatgctcgggcattcctccttgaaaactacacaacgctatacgcacgtctccatcgagcagctcaagaaccgttacggacaggcctttccgcgggcatgaccactatgtggacattggttaacaaactcagcaaagactgaacctagccggcaagaacccctgaattttacatgggtgtaacaaaaaatacactgcttgtctcccaagtgcgcaaaaatgacaggtaatcagcaacggggttggattgttcgagacatcgtgagatgcaagtctcacggtgacggggaatccagccccgttcgcatgaggcggggctgagacgtcctgcaacctaatgaataggagaaaacatatgaagaagaaagctcttgctttcgctgccatggcttgctccgtggccatgctgctgagcgcctgcggcggctccaacagcaacgctgcctccggtgacaccgctggctccaacatcatcactgcgtacaactccgaaccgcagaacccgctgatcccgggcaacaccaacgaaaccggcggcggcaagccggtcgacctgctgttctcccgtctggtctccttcgacaaggacggcaaggcttccaacgaagtggccgagtccatcaccccgaacgatgacgccacccagtacaccatcaagatcaagtccggctggaagttcaccgacggcactccggtgaccgctgagtccttcaccaaggcctggtcctacgtggccaacgccaagaacgcccagaagtgctcctccttcttctccgccatcgccggctatgacgatctgcagaaggatggcctcaaaggtgacgagcagctctccggcctcaaggtcgtggacgacaccaccttcaccgtcgacctgaaccagtccgactccgtgttcccgatcaaggtcggctactcggccttcgccccgctgcccgagtccttctacaaggatccgaaggccttcggcgagaagcctgtctccaatggcccgtacaagctggaccactgggatcacaacaaggaaatcgccctcgtcaagaaccctgactataagggtaacgagcagcccaagaacgacggcgtgaccttcaaggtctacaccgacgactccgccgcttaccgtgacattcaggccggcaacctcgacgtgatggaatccgtcccggctgccttcaccaagaccttcaagaccgacaagaaggtccaggcttactccgaggccggctccgtcatccagaccttcaccatcccgtcctcccttgaccacttcaagaacgacgaggaaggccagctgcgtcgtcaggccatctccatggccatcaaccgtgaccagctcatcgacaaggtgctcaacggcaacgccaccgccgccaccgagttcacctccccgaagaccccgggctactccgactccctcaagggtgccgacaacctgaagttcaacgcctccaaggccaaggaactgtgggccaaggctgacgccatctccaagtacgacggccagctcaccttctcctacaacgccgatggtggtgccaagccgctctacgatgctatcgtgaaccagctcaagaacaacttgggcatcgacgcggccaccaacccgatcccgaccttccaggaattccgtgacgcggtcaccaaccgtcagatgaagggcgccttccgtactggctggcagcctgactacccgttcgccgagaactacctgtggcagctgtactccaccgctgctgctgatggcaacggctccaacgatggtgactacaagaacccggccttcgatgacctgtgcaagcaggctgctgccgcttccagcactgatgacgccaacaagctgtaccagcaggctgaggaaatcctcctcaacgaccttccggccatcccgctgtactactccaacgcctccggtgtggcttccctcaacgtgaagtccggctacgccttcgattggcagaacctcccgacctacaccgagatgtccaagaagtgagtctgactcactgaacggataccgttaggtagttcggaaataaagggcgaggatcgcaagatccccgccctttttgttgtgtgaggggtgcttgctcacgccatcgggaaccaagttaaagtatccactatccgaccgcaaccatggacatatccaccaacattgcccaatctcaaaccttgcgttaacgcaaatttacatatcacagtccgggcatgcggtaaactgtcggagtatttatcgaccggcgggggcgtactataccctttctggccggtctaggaaataaggagcaaccgtatgggtaagtatcttctgcgacgcattctgcagatgattcccgtggttctcggtacgactcttctggtatatgcccttgtattcgccctgccgggcgaccctgtcaaggccatgttcggagacaagcccgtcaatgacgccgtcgcagcccagatccgcgcagaataccatctcgaccagccgttcatcgttcagtactttatctacctgaagaatgcactgaccctgaacttcggcgataccttcgccggccagcccgttctcgacgaaatcacccgcgccttcccggtcaccatcaggctcggcttgatggcgttcgtgttcgaggcgattttcggtgtggtcttcggcattatctcgggcctcaagaagggcaagtggtacgacaccgtcatcctgatcgtctctctgctgcttatttccgtgccgaccttcgtcaccggcttcgtcatgcaatatgtctttggtattcagtgggcgatattgccggtgacggcaggcgccgaccccggcttccttgatctgctcatgccggccatggtgctcggttcggtgtcgatggcctatatcatccgactgacccgctccgaaatctcctccaacatcgccgaggattacgtgcgcaccgcacgcgccaagggcatgtcgaacggtcaggtcatgctgcgccacgtgttacgtaactccctgattccagtcgtcacttacctcggccaggacatcggcgccctgatgggtggtgccatgatcaccgagcagatcttcaacatccacggcatcggcttcctcacctaccagtccattctgaagggcgaggcaaacctggtggtgtccatcgtcacgttgctcatgctgattttcgtagtgtgcaacctcgttgtcgacatgctgtacgcggccctcgatccgcgtatccgttacgcgtgatagggaggagtgagtcacatggcaaacgaaaccactgaaaacgagctcaacgagaccggcgagccaggaaccgaatacttcatggaaaccctgcccggtcaggaccgttacgtagctcctctcgacgagaccccgttgcaggacgtcgattccgtcgacgaatccgcaccggccaccagcatgtgggccgacgcatggcgaaccctgcgccgcaatccgctgttcatcatctccgggctgctgatcctcttcatcatcgtggtggccatcgcccccggtctgttcaccaagcaggatccgaacgcctgcgatctgggcaactccttgagccccgcctccgccggacaccccttcggctacgacctgcagggctgcgacgtgtacacccgcgtggtctacggcacccgtacctcactgtccgtcggcgtgctctccacgctactagtcgtgattgtcggtaccctgatcggtgccgtcgccggcttcttcggcggttgggtcgacgcggtgctgagccgtatcaccgacatcttcttcgccctgcctatgctgctcggcgccatcgtggtgctccagatgttcaagacctccaagtccatctggaagatcgtgctggtgttgacgctcttcggctgggtcggcgtatgccgtatcgcccgaagcgccgtgctggaatcgaagaacctcgaattcaacaccgcctccacggccctcggctccacgcctgccaggaatctgttccgccatatcctgccgaactccttggccccgatcatcgtcatcgccaccacttcgctggcctcctacatcgtggccgaagcaaccctaagcttccttggcgtcggtctgccgaccaccacggtgagctggggtggcgatatctccagcgcacagaccaacctgcagaccgatccgatggtgctgttctacccgtccgccgcactggccatcaccgtgcttgcgttcatcatgatgggcgacgccgtcaaggacgccctcgacccgaagagccgtacggcctgagtgaggggagtggagaatcattatgactgacaacaccaacgccaagatgctggccatgcagaaagaacatggtccgctgctggaagtccggaacctggccatcgacttcaccaccgacaccggcaagccggtgcatgcggtgcgcgacgccaacttcaccgtctaccccggccagtgggtggccatcgtgggcgaatccggctccggcaaatccacctccgccatggctgtgctgggcctgctgcccggcaccggtcacgtggtcaacggctccatcaagcttgacggcgaggaaatcgccggcgccaagcagagcgagttcgacaagctgcgcggcaccaggatgggcctcgtgccgcaggacccgatgagcaacctcaacccggtgtggcgcatcggcacccaggtcaaggaggcgttgaaggccaacaacatggacgtggaccatgagaagcgctccgccctcgccaaggccctggccggcgacgaggtcgaagtcaagggcaacgacgacgagaccttcctcggtgccaaggaactgcccgagctcatgaccgaggccaagaaggctttgaccgaagccggcgtgtccggcgaggccttcgacaaggccgtcgcccgcttcaccaacgaatgggttccgggctccgaaacccgttggcgcgtggccgacgacctcatcaaggccggcgtggccgacgaccaggcctggtatctggctaagaagtacgtcaccggctccacaatggatgaccgtatcgcgggtctgctgtccgaggccggtctgcccgacgccgctacccgtgcccgccagttcccgcacgagttctccggtggtatgcgccagcgcgcgctcatcgccatcggcttggcctgccgccccgatctgctgatcgccgacgagccgacctccgccctcgacgtgaccgtgcagaagcgcatcctcgaccacctgcacatgctcaccgactcgttgggcaccgccgtgctgttcatcacccacgatctgggccttgccgctgagcgcgcccagcacattgtcgtgatgtacaagggtcaggtcgtcgaatccggcccatcccttgaagtgctccagcacccgcagcacccgtacaccaagcgactggtggccgctgccccgtcgctggcctcccagcgcatcatctccgccaaggagcgtggtgaggatgcggacgctctgctcgatcaccacatcgccggcgaaagcacgctcgaaaagagcgagcacatcatcaccgtcgaccacctgaccaaggaattcaagctgccccgcaagaaggagatgttcaaggccgtcgatgacgtgtccttctccgtcaagcgtggcaccacactggccattgtgggcgaatccggttccggcaagtccaccgtggcgaacatggtgcttcacctcctgaagcccacctccggcaaagtgttctatgaaggtcgcgacacctccacgttcaagtccaaggaccttctgggcttccgccgccacgtgcagccggtgttccagaacccctacggttcgctcgacccgatgtactccatcttccgttccattgaggagccgctgcgcatccacaagatcggcgacaagaagtggcgtgccaaccgtgtcaaggaactgctggacatggtcgagatgccggcttccgtgatgggccgttacccgaacgagctctctggtggccagcgccagcgcatcgccatcgcacgagccatggctctggacccggacgtcatcgtgtgcgatgaggccgtgtccgctttggacgtgctggtgcaggaccaggtgttgcgcctgctcaacgatctgcaggccgaaaagggcctgagctacctgttcatcacccacgatctggccgtggttcgtcagatcgccgacgaggttgtggtgatgcagcacggcaagctcgtggagcatgccaccaccgacgaggtcttcgaccacccgcagaagcagtacacccgagacctgctcgacgccatccccggcggcaagctccagctcggtttggactgataggacattctaaattagctccctcttatgagggagctaattttttatacctcaatgtaatcgtgagtgcggtactggtagagaggccaaaatagtatggctgcatgaccatcaccatcaccacatcgaacgtcaacggcattcgcgcggcaaagcgcaagggtatcgaggactgggccggcaaacatgctccggatgtctggtgtatgcaggaagtgcgcgccccgcaagaggatgtcgattcgattttcggcgaattcggtttcgagtatgccaccgccggcaagatcgcctcaccctctgacctgcattcgctgaacgaggtctgccgtgtcaagggtcgtgccggagtcgggctcctcaccgatcttgaggtgaccgataaacgctatggacttccgggcttgagcgaggatgtggattccggccgttggattgagaccgatgtcaagacgccgcagggatacacgatcaccgtggcctgcgtgtacgtgcacgccggcaacaccgatgattcgaccaagatggaacagaagtaccgttttctggacacgatgctcactcgcatgggcgagttgcgcgacgaggccgcgcacggcggcaagcaggcggtattgtgcggcgatttcaacatcgcgcacacgccgctcgacatcaagaacgccaaggccaacgaaaagcacgccggcttcctgcccgaggagcgcgcctacgtggacaagtggctggatgaatatgagtttgtggatgtgatgcgttcgctcgccggtgatattcagggtccgtacacgtggtggagccagcgcgggcgcgctttcgacaacaatgtcggctggcgcatcgactaccagttcgccacgcccgagctggcggagaccgcgcgcggctttgtgatcgacaaggcccccacatacgagttgcgttggtccgaccacgcgccacttaccatcacatacgacgtgtgactcagctttctctaagcctgagtgctagtgttagcaaggttgcaaccgttacatgaaacgaggaattatgggactgttcggattcggcaagaagaagagcaagaaggaagccgagccggccgttgagcctgtcgatgaagacaaggtggctgccgcagaagcgaacgctgccgcaaaggccgagagcgcggagaccgtgctcgccgagccggccggcgaataccagggccgcggagaagagcgaggcccgtgggacgtcaatgatgaggacgtgcccgattatgacgattatctggatctgggcgcctactacctgcccttcctccggggcatccaactgcgtatcaaggccaaccgcgccacccagcaagtgcttggttccaccatcaccttcggctcctccagcctggagatcgaagcctttgccgcacccaagaccctgggactgtgggatgacgttcgcggtgacctgcttgaagccaacaaggccgcttctgaagtggacggtgtgttcggcaccgaactgaagctgccggtcaatgtcaagggcggcaagaccgtgaacacgcgcatcgttggtgtggacggcccgcgctggatgctgcgtggcatcttctccggcaaggctgctatcgatccggacagcccggagaccgaggcgctgaacaagttcttcgccggcatcgtcgtcgagcgtggcgaggagcctttggcgccgcgcgatctgatcccgatgcatccgccggtcgcccccgctgagcgtaaggccgccaaggccgcggccgaagccggcgaggcgaacggcaaggaacacttcaaggacattccggacaacaagccgaagggcccgttgagccaggaccagcagaccgaagtgaagaccacgctgtctcgcggcccgatgttctccgaagttcgctgatttataggaagagacttggcagacaacaaacgcaccggcctgtccgctctagccgacgccggcaatgaaggcgaggatttctccgtcatcgacgccatcggtggcccgcgtggcgtcatcgaatccatgctgcctggcgtggtgttcgtcgtactgttcgtggccacgagcaatctgaatctcaccattgcggtttcggccgtgttggcggtattgcaggttattgtgcgactgattcagcgccagtcggtaatgggcgcggtctctggtctggtggcggtaggcatctgcctgatttgggcatggcagactcatgaggcccgcaattactacatcttcggattcattaccaatgctggctatgccgcgttgcttgccgtgtcgctgattgcgcgcgtgcccggactgggtttggtcgtcgaattcatccgtagcctgcccaccgagcatttcaaggcatggttccatgactggatggacgacaaggccctgaaacgcgcctatatgattgtcaccggcctgtgggtcggtctgttcctgctgcggctggtggtgcaggtgccgctgtatctgaccaaccatgtggctgcactcggcgtgacccgcctgctcatgggcattccgttctgggcattggcgatttgggtgagttacctcattattgccacgccgatgcaccggcataaggtcgcggctaggaagatacagactgaagtcgctgttgatgccgaactcgaaccgagcgcaaccggaaaggacgatgatgcaagctgaagttcgtatcgaacgatacgccgaccaaggccgctgcgtggcccatatcgacggtcgtgtggtgttcgtccgcttcgccttgcccgacgaactcgtgcgagtcgaacttgacgagccccacgaccgggacgaccggttctggaccggcgaagtcgtcgaggttctcgagccgtccgaagaccgagtcaccccggcatggccacttgccggtcccttggcgatgggcgggggagtgggcggcgcggatctcgtgcacgtctctttgcccggccagctcaagtggaaggccatcaccgtctccgaacagatgagccgactcggccatatcgacgtggccgttcccatcgagcgcatgcccggcgacaaggcagccggcggcctcaattggcgtacccgcatcgaaatgattgccgacgacaacggcatgccatccatgcgccggcgcggcacacacaaccgcgtggccatcgacaccatgccgcttgccacgcgcacgctgctggacgtcgccaagcgcgaacacgtgtgggaaggcggctttgaacccggctcccagattcgtctttccgtgcccgaaccgcgcggcgagatcgtcgataccgcggcagcagacgacaattacgccgtacttgtggacggcgaactgcgcgccggctcccagctgctcaccgaacaggtgaccatcaacggcacgaccttcgactatcaggttgacgccaacggtttctggcaagtgcatcgccaagcgccgatcgccctcggtacgcacgtgatcaacctggtcaacgggcagctgcagtcagcggcggacgccgtaatctgggatttgtattccggttccggcctgttcaccctgccgctggccacaatgaccggtgaacgcacccgcatgctcagcgttgaaggcgcgcgtgtggccgtcaagaacgcccagcgcaatctgcgcgccatgaacctgaacgacgtggacgcccgcgcgggtgacgtctcgcgcacgctggaccatgtgccggcgcatctggccaagccgaatgtcgtagtgcttgatccgccgcgtgccggtgctcgtgccaaggtctgccgccagattgccgcggccggcgcatccagcgtggtctacatcgcctgtgatcccaccagcctcgcacgcgacaccgcgacactcatcggcgaaggctacgagctcaaagacatccgtgccttcgacatctacccgatgacccaccatgttgagacggtggccctgtttacccgctgacaggtgagcatatgacacgacgaattctcggattgctggcctgcatggcggctgtgttgtccctggccgcctgcacgccggccggtagggcggtcggcgatacccaagacagcatgccggaagtcgcccacgattccacacatcccacggatgtcacagtcggctttgtggggtcgactgacaccgccgcagacgagttcgtcatcaatgcgctgtctgatgacaaactcaatgtctactatgcctcgctcgaaacatccgcaagctcggcaaacgcaactgatggtgtatccggtgaaaccgaatcttctgacgccggcactaccagcgaaaacggtgccgatagtatggatgctcatactggcgtcgacaagaatgcggtcaccgcacagcagggtgttgccgatttcgtagctcgcgcggtcaaaatcgtgattatcagcggcatcgacgttaccgacgccaaccgggagagctggaaccagacattgaccaatgcgcgtgaagccggtattccagtcgctctcattgatccaaagcatgcgcccgaagatgaactgctgtacgccgtcatccttcacctcaacaccaacagtgccgattctggcgacactgccgataccaagccaatgactattactgacgccgtgctcaccatcacgcgcgacgaaccccacgaacgcgagatcaaagtcaccgtttcctgagccgaatcaggcccttgaagctgagaaagcaccctgaatcatccctgagccttagcggattgcgaaacaagacgcggtaggctggagaatatgagtgcaacaacagccgtggaaatgcctgagatcggagcgaccggtcttacccccaaagaagtggtgcagcgtatcgaaagtggccaatcgaatgcggtgaaaacatccacctcgcgttcggttcaagatatcgtgcgagccaacgtattcacgctgttcaacggcatcatcttcgccgcgatggtactggtgctgatcaccggttcctggagggacgcggtgttcggtttcgtcatcatcatcaacacgggcatcggcatcgtcaccgaactcagggccaagcgcacgctggacaggctttccatccttgtggcctccgaattcctcgtgcatcgtgacggcagggacgtggaggtgccccacaacgagatcgtgctcgatgacctgctgtggatccgtgccggcgaacaggtgccggccgacgggcagatcatccagacctggggactggagcttgacgagtccatgctcaccggcgaatcgcgtaccgtgcgccacaaggtgggggagcaggtgtattccggcgccaccgcggtctccggcatggcattggtcaaggtcaatgcggtcggcagccattcctacgccgccacgctcaccgcgcaggccaaggtatacaagaaaaccgtgtccgacctgaacaagggcatcaacacgattctgaaattcatgaccttcctcgtggtaccgctgtgcattctgctgattctttcgcagattcatacggtcggcggttggggcacggcactctccaccggcgaatggcggcaagccgtggtttccgcggtcgccggcgtagtaggcatgattcccgaaggcttggtgctgctgacttcgctgaacttcgcggtggccgccatgcgtctcgcccgtcacaatacgctggtgcaggagcttgaatccgtggagacactggctcgcgtggacgcgctgaacctcgataaaaccggtacgatcaccgatggcggtatcgccttcaaccggctcgtgatgctcgattccgccaatgcggctgcggaacaggcagccacgcaggccctctacgactgctgcaacgaagagcagcccaacggcaccggccaagccgtactcgccgggctcaaggcccaaggatatggggcaggtgcggttgagtctcgtgtcccgttctcttcggcgcgcaaatggagtgcggtgcgtaaatccggcgagacctggtacatgggagcgccggaggtgattatttctgcgcttgagggtgactattcgtcggtgttgcagcaggttaacgagtatgccaatgacggcaaccgtgtgttgctggttgcgcggtctacagctcccctctccgaggggagctgtcgccaaaagcgactgaggggagcagttgagggagccaatgtctcggacggccggcaactggatgtgcaggctgagccggtggcgttggtgttgtgctctgagaagattcgcgaggacgccgagcggacgctcgcttggttccgtgagcagggtgtgcgctgtcgtgtgatttccggtgacaatccagtgaccgtgggtgccatcgcccgcagagtgaaactcaccggcgaccatgagccggtggcgatggacgcgcgcgaactgcccgaggacgtgaacgaactggcccgcgtgctcgaaaacgtcgatgtgctcggccgcgtgctgcctgaccagaagaaggccatcgtgcaggcgttgcacacgcagaaccacgtggttgccatgaccggcgacggcgtcaacgacgcgctcgccatcaaggaggcggacctcggcatcgccatgggcaatgcggcgcccgccaccaaggccgtggcccaggtggtgctggtggattcgaagttctcgcacctgccggacgtcgtggcgcggggccgtcaggtcatggccaatatggagcgcgtggccagcctgttcctcgtcaaaaccgtgtactccgcgctgatctcgctcggcgtagtgctgacgcaaatcccatacccatacctgccgcgccatatcacgtatatcggcgctctcaccatcggcatgcccgcgttcattctggcgctcgcgccgaacacgcgccgctatattccgggattcctcaagcgcgtggtcacgttcgcgctgccgggcggcatcgccaccgcgctgtcggtgctgctggccgcttgggtgctgccgccggtcatgggctggaacgtgaccggcgatgccgcggacctgtccgccctgcgcgccaccagcgccatcatcctgttcgcgatgggcgtgttcgtgctggcccgcgtggccagaccactcaacggttggcgtggcgtgctggtggcggtgttcgcggcggcgggcgtaatcggcgcgttcgtcccgttcgtggcgaacttcttcgccctgattctgccgaccggcgccacgatggtggccacgctgatcgcgttggccggttccgcgctgatcttcgcgctgtgcctgtggctggcgccgctcgtgcgcggactgacgggcaagctctcgcgtcggcattgagacggcggcgcgattgtctcatacttcaagccgacacgccagagcctcggtaacgtgcccgtaccatgtgtagcggataatcagcggcatcataagccgattcatgatttcggaggaagcatgtccttacgcgacgaccagctggctaccctcaaggcagccggcaaggacttcgattactacaacatcgccaatctcgacggcatcgatcatctgccgtactcgctgaaggtactggtcgagaatctggtgcgcaacatcgacggtgccaacatcaccgacgagcacgtcaagaccctgctcgactgggatccgaacgccgaacccagccacgaaatccagttcacgccgtcccgcgtgatcatgcaggacttcaccggcgtgccctgcatcgtggacctcgccaccatgcgtgacgcggtcaaggacctcggcggcgacccggaggtcatcaacccgcaggtccagtccgacatggtcatcgaccactccgtgcagatcgacaagtacggcatcgccgacgcggtccagcaaaacatggacatcgagtaccagcgcaacggcgaacgctaccagttcctgcgctggggtcagcaggcattcaagaacttccgcgtggtgccgccgggaaccggcattatccaccaggtcaacatcgaatacttggccaaggtggtcatgagcaaggccgaggccaacggcaacgcgctcgcctacctcgactcctgcgtgggcaccgactcgcacaccaccaccgaaaacggtctgggcgtgctcggctggggcgtcggcggcattgaagccgaggccgccatgctcggccagccgatctccatgctcgtgccgcgcgtggtcggcttcaagctcaccggctccatcccggagggcgttaccgccaccgatgtggtcctgaccatcaccgacatgctccgcaagcacggcgtggtcggtaagttcgtggaattctacggcgaaggcatcgcctccgtgccgctggccaaccgcgccaccatcggcaacatgggccccgagttcggctccacctgcggcatcttcccgattgacaatgtcacgctcgactacctgcgcctgaccggccgctccgaagagcaggtcgcgttggtcgaagcctacgccaaggccaacaagctgtggggcgacgcttccgacccggattacgtggaaccgcagtactccgaatacgaggaactcgacctcggtaccgtggtgccgtccatcgctggcccgaagcgcccgcaggaccgcattctgctgtccgaagccaagagcatgttcgagaagaccgcccccgcctacgagaccgagaagaccgtcaaggatccggtggccgtgtccaccgacttccgtggcgatttcgacatcgaaaacggcgacgtggccatcgcctcgatcacctcatgcaccaacacctccaacccgtccgtgatgatcgccgccggcctgatcgcccgcaacgcacatgccaagggccttaagcccaagccctgggtcaagacctcgctggctcccggctcgcaggtcgtggccgactacctcaaggccgcggggctgcaggacgacctcgatgcactcggctaccagctcgtcggcttcggctgcgccacctgcatcggcaactccggcccgctgctgcccgagatttccgaggcgatcaacgccaacgacctgaccgtcaccgccgtgctctccggcaaccgcaacttcgaaggccgcatcagcccggacgtcaagatgaactacctggcctccccgccgctggtcatcgcctacgcgctcgccggcacgatggacttcgacttcgagacccagccgctcggcaccgacgcggacggcaacgacgtgtacttgaaggacatctggcccaccaatgccgaggtcgccgccgtggtcgacggcagcgtgagccgcgagatgttcctcaaggactacgcctccgtgttcgacggcgaccaccgctggaagggcctcgacgtgccggaaggcgagctgttcgcgtggaacgacaagtccacctatgtgcgcaagcaaaccttcttcgacggcatgaaggccacgccggacccggtcgccgatatccacggcgcccgtgtgctggccctcctgggcgactcggtcaccaccgaccacatctccccggcaggcgcgttcaaggcctccagcccggccggcaagtatctgaccgagcgcggcgtggagccgaagaacttcaactcttacggttctcgccgaggcaaccacgagatcatggtgcgcggcacgttcggcaacatccgtctgcgcaaccagctgctcgcctccgtgggcgaggaggtgacgcctggcggcttcacctacgacttcctcgccaagaagccgaccacgatcttcgaagcctcccgcgactacatcgacaacaaggtgccgctcgtggtgctcgccggcaaggaatacggcaccggctcctcgcgcgactgggccgccaagggcacggtgatgctcggcgtcaaggccgtgatcaccgaaagcttcgagcgcatccaccgctccaacctgatcggcatgggcgtgctgccgctgcagttcccggcaggcgaatcctatgagtccctgggcctcaacggcaccgagacctacgatatcgccggcgtcgagaagcttaacgagggcgtgacccccaagacggtccacgtcaccgccacccacgaggacggctccaagaccgagttcgacgcggtggtccgcatcgacacgcccggtgaggccgactactaccgtaacggcggcatcctccagtacgtgctgcgcaacctcatgaagtgacttattctggctcccctctctgaggggagctgtcagcgaagctgactgagggggagtaaaggccggtatccaccaacggatgccggcctttttcatgcacgtcagtatgctatactgtatagcatctttggaatggaggttgccatgaccatggtccaaatgaacgttcgcattgatgcgaaactgaagaacgaggtcgaagaagtcctcaagggcaaaggcgtatcggtgagtgacgtaatccggtcgctgtggttgtacatcgccgaccgcaaggaagtgccggcattggaaacgaccgccgaagagcaggcccgcgaggcggaaaagcagcgcaagctgaaactgattcgagaaggtgccggatacgtgcacaaggaactggtcaaggccggactgatctcagaagacaccgacctcatggaaggccttacctacaagcagttccgcgataaaatgtacgacgagcaacttgatgcgtattacaacatgaagagggccgattgatgaccgacgtttccatgcagcgtattttgctcgataccaacgtactgttggactatttgctccatcgcgatgatcacgccaagatggcggaagcggttatggaacttggcgcgaagaacaacattacgttgttgtgcgcgtcattgtcgctgaaggatatcgcatacctatcatcatcggcgattcgtagggaattcaaaccgaatgaatcggaagtggagaatttcactcgcggctttctgtcgtcacgggtgccatggcgttgtatcgagcaggtgaaggagatgtgtgacatcgtcgctgtcgatgagtcgacatgtgataaggctttttccctgcaaaaacggcatcgggattttgaagatgatctgatcatcgttgccgcgcaacaatccggtgccaactgtgtggtcacatcggatgccgaattaatcagtcattttcccgaatattgcaaaacgccggctgaaatcgtggcggcgctggcatagacaagcgtgtggctcccctcacggaggggagccaccaatgatgtgccggctactgcgcctgcagacggaactgcttccagatgtcactgagcttctggccgttacgcgtgcgcttccacacgtccagaccgccgccgcgacgtcctccggcggcggcacgggccgcggcggtcggagtcggatattcggagccgtcatccagacggagacgaccgttttcggtgaccgtggcgaaccagcgctcgcccttgcgcggccgctcccacaccagacgctcgcccggcaccagcagaccagcgtcaatcacctgccggatcgtgacgcgccgcgaactatgagacggccgtggagaggtcttcgacaactcatcgacattctgcttggtcagatcacgggcgtccttgtcataccggatgccccagtattccacgatgagtcggaccgactcttcctgccgcgcctccagcagggcaggtgtgcagtcagcgaaatccttcaactgattggtcagcgggaaacgacgtgaatccgcgcgcaacagcatgcggtcgcgacgtgccggatattcactcaacctgtccaactgatcctcagggccctgcaccagcgccatattgccgagtcggtacatccagaaatcatgctgatcctgcggccagtccgcaaacgatttcgaccgttcgatatccaacggcataatcggcagcgcactgaaccggcgtggtcgatccaactgcatgccggccttctgctcgttggcgcgaatcagcagcagacggaccaaatcgccgtcaccctgcatctcgccatgcaaacggaccaatgcgccttcacggtcgccgtccgagacatgcaacccgttcacgcgctggaccaaatagcccttgtcaagatcacggatggcggcgttcgcataaccgcgccgctccaacgctccagtgcgattcagcgtgcggatgccggtcacctgttccaatgcggtcagaatttccagcagccgacgctcgtcatgggcgcccaacgattccaacgtggccgtggttctggcgatacgtgaggcacgaaccacgaacggcgacaaatcggcgtcgcccagcccgcgatacgaattgaccaacgcccacatggccacgggcttccactcgtggctgcggtaatcgtccaatccctcaagccggccacgcacctcggcgggcagtacggtatcgctggggcgcgcgatgatccgccacgccatcgcgtagggtgccagcacctggttgatgaacgtgggcaccgtgcctttgtcgatgtacggttgcagcacgtcggccaggaaatcctcgatgagcttgtcggtggccggcttgtgcgtgagtacgagatgcagataggcgaagaattcctcacagtcatgcggatcgtcgccgattgggtcaatgatgtcatcccaacgggctgcgtacacgtcaagttcggcggtcgacaggctggccgtggcgcgcgccttgaacacgtcggacggggtgagcggcaggccgcgcatgttcatcacgtcgaagatgcgatgcgcgccgtcgagatcgtcggtggtcacgatgacgagcgtcacctcgttgaccagatactgcgcgaattgctggcgttcggatgccgaccaattggagatctcgtcgtacgtcttgcggatgttggcgacgatgttgcgttgcgcagcggtcgccagatcgtcgtcgttcatgtcgaacacggattcgaggttgtcctcctgcacgtgttcgcggaagaacgccgcgtcgcgctcgcgcaacgtgaggcgaggctcggtgacgatgccgcgcagcttgtcgccgggctccaccagcagcgcgtcgagttggcgcatgaggtccgggtctcgctccagatcgcgcagcacggcgatgatgatcgacagggataccagccgctgctgcccgtcgatcacgtcataacggttgtcgccctcgcgtaccagaatcagcgagccgaggaagtacggggtaccgggtgacttgcaggcgtcgtccaagtcgcttaccagttgcaggatgttctcggccttccatatgtaggcccgctggaatgaggggattgtgaaccggaaatccggggtgaacactttcccgagtggtagttccttcgcgctgattgccatgtcaatcccttcgtcgccggcctttggacggtatgccgacgtgccgactgtgctcaagcctaccagtgttcgcccggcggcgggcgcatcacgccggctcgggcaccgacccctcgtacaagtagaacgaagacgggttttctcccggcccggatgcgggcagtgactgctcgcacacctgcgtcaggccgcgatgtacatagaatccgacatcgcacgtggtatccgtgaataggaagtattgacgtatgccggctgcgtggaatgcgctcatcatcgtctcgaacatgcgccggcccagaccgtgaccgcgcgccgccggatcaagtacgaacagcaccacttcagccgaatactcatggccaatgttcgccgcctgcttacgcagttgcctatcgacatgaagagtcccgagaatctcgctcgcagctgccatgccgtcgtgggcaaacgccagttgcaatagcttgcgcaacgaatgacgccggtgcatgttcagcgggctgcgatggtcgagctcgtcgatacgccccacaatcaatgcgacgggtttatcttccagctccgcgacaaaggccgtggtcacacgtgccagacagttctcccaatcggcctcggctgccagcaagccggtccgctcatcatattcggcgtaccaagtgcggcgcaccaggtcgatcagcgccggataatcgtctttacgtaacgttcgaataatcgcttcactcatgttctccattatgactgatatggctcgataaccggacgtgttacagtcgtgccggcaaatcggcccgctccaccagcctcgccatctgtacgcggcccatattgagcttgtccgccgcggaggagagatgcgccttggccgtacgctccgagataaacatacgggaggcgatttcggtgttgggctatgtgctgcaagacgattcgccgattacggtgtatgccacgcgcatggtggaaacgcccgttacgctttgagatgagcagaacgagccgatcgatcatattcatggaatgttcagctttgttcctctaagattggtactggaacaaacgctaaaggagcgattatgacattcggtcagcagccccagaacaacgggcaatacaacccgcaatacaacacgcctgattacaacgccgcccaacagtctggatatggccagcaatacgcacagtccggttacggccaggactactatgcccagccgcagggcgctcccacctaccaatacgtgccgcagggtactggtgccggtgcgggtgcggccaccatcaacacgacgatgacctacaactatgaggaagcccgccgagtctcagtgaccaaggtgtacggcgagatgaccatcggcatcctcgtcaccgccgtggtcgccgtgctcggccagatcactggagcctactacagcttcctcatggccaccggcatggtgggcctcatcggcctgtgcgtggtgcagattgccctggccgtggtgctcggcatgcgcgtcaccaagatgaagtcggccaccgcgcgcgtcatgttctatgtgtacgccgcattgatgggcttcaccttgagctcgatcttcatggtctacgacctcggctcgatcggcgtggcactcggtgtcaccgccgcgttcttctttgcgctgaccatgttcggcatgactaccaagttcgacatgctcaaggccggcccgatcctgatgatcggcctgattgtgctcatcatctcgcagatcgtgctcgccttcgtgcaggtcgacggcatgaccaagatcgtctgcgccatcggcctgatcctgttcgccggcatgaccatctacgacgcgcagtccacgcgcgcgctgctgaccgaatacgaggcccagggcccggaaatggtcaagaagatctccatcctgtgcgccctgaacctgtacctcgacttcgtgaacatgttcctgtacatcctgcagctgctcggcaacagggactagcctcgacagccgattggcgagcggcatgtagcctgcccgtcaaacgtcacagcccgaccacattgtggccgggctttttcatgtctgtcacattcgcacgttaggctggctccccgtgaaaagacaagaactcgtaggcatgctgagcctgttgttgaccgcgctgatctggggttttgcgttcgtggcgcaggtccagggcatggattcgatgtcgccgatgttcttcaacgccgcgcgcttcacgctgggagcactgtctttggtgccgattctgctgtggatgcgtggccgggggagcgcggataagggcgatacagccggggccgatgtcgttgggaccgaggcatccgtggccgtctccacagatgccgcatcgaacggtgcatccgacgtcgttaccatcaccggtgccaagctgaatgcgaacaagcccgattcggccgtggcgcgattgctcgccaacccggtggtcgtttccgtgatctgcggcatcgtgctgttcaccgccagcaccctgcagcagtatggcattctgtacggcaaatcggccggccgtgcgggattcctgaccgccatgtacatcgtgatggtgccgttgctggccttcgtgttcctgcgccggcgcatcggcatgctggtgttcgtggccgtggcgctgtccatcgccggcttctatctgctgtgcatcaccgatggtttcggttcgatcggcctggcggatatcctgctcgtgttcacggccgtgctgttcgccgtgcatattctggtgatcgatactttgggcggcaccgtggacgccatcaagctttcattcggccagttctgcaccaccgccgtgctgagctgggcgggttcgctgatcgaaggctcggtcgactgggccggcgctgctcattcctggattccgattctgtacgccggcatcggctcggtgggcatcgcgtacaccttgcaggtggtcggccagcaatgggtgccaccgacgcgagccagcctgctgatgagcctcgaatcgttcttctcggcggtaggcggtgcgttgcttctcggtgaagtgatgaccccgcgcggctacctcggctgcgccctcatcttcctcggcaccctactggcccaagcgccggccaggctgccgaagtggccgcaacggtgaatgaatcggccgcaggccgattccatagcacctcagtccgaggtcttaggcgcttcgcccacttgcggcgcgccgttgatgtcgcggtggatgttctgcatctgtacctcgatgttctgcaatgagcgcgcgcagtcgagcagcgtctgggaatgctcggcgagcttgttgtccggcaaatcggtcttgtagcgcagcgcatgctccagcgacgcccaataatccatggcgatggtgcggaactgcacctccaccggcgtgtaatgcgcgcccgaggagaggaacacgggcaccgcgtagattacgtgcaatgaacgatacccgttctgtttcgggttcttgatgtaatccttgacgcgcagcacctgaatatcggactgcgacgacagatagttggacacggaatacacgtcgtcgcggtaattacagatcacgcggatgccggccacatcgaacagattgtccttaatcgaattgacgccgatcggcagacccttgcgctccagtttgccgatgatcgagctcaccgacttcagacggcgttccatatgatgtatcgggtcatggctgaaccgcacctggaactcgtcgtcgagaatctccagtttggtgctgatctcgtacatcgcgccttcatacacctgcatgaggtcaacgaattcaacgacctgttcgggagtgaaggtgcctcccggaagatccaacgctttgagacgggcttgcagatcggaggttttgagtcggctatgtcggtcaagtatcacgtccaccaatatactcggcggattccagccaatctggacgttcgcggggaatctttccaagaacccataatttgacatcgtgacaaccaatggcatgcgtgaccggagcatgacgaaccccgtcgatagaatcggtcgttatgaatgaagacatgatgaccgaggcggagcgcgcctcgattgcagccgatggaaccgatggtttgctggggaaacgcggcaagggcgtgttccatatccatacgctcggctgccagatgaacgtgcacgattccgagcgcatcgccggcgtactggaggccaatggctacgtgcctgcaaccgaggaccagatcaatgacaatgacctcgatttgctggtgctcaatacctgtgcggtacgcgagaacgcagccgaacgcatgtatggcaccattggccgattcaatcgcgtcaaactggttcggccgaacctgcagatcgccgttggcggctgcatggcccagcttgaccgcaagaagatcgcggatactgcgccatgggtttccgcggtgttcggtaccaagaacatcgaagatctgcccaagctgttggatcagaatcgtgcgaccggcaaggcgcaggtccaggtcactgaacaattgcggcagttcccgagccagcttcccgccgcccgcgcctcccgcatcagctcgtgggtggcgatttccgtgggctgcaataacacctgcacgttctgtattgtgcccaccacgcgaggcaaggaaaaggaccgccgccccggtgacattcttgatgagattcgccaatgtgtggccgatggtgccaaggaggttacgcttctcggccagaacgtgaattcgttcggttatggtattggcgatcgatacgctttcagcaagctgttgcgcgcctgcggcaccatcgacggtctcgaacgcgtgcgcttcacctcgccgcacccggccgccttcaccgacgacgtcatcgccgcgatggccgaaacgccgaacatcatgcaccagctgcacttcccgctgcagtccggctccgaccgcatcctgcgcgcgatgcgccgctcctaccgctccgccaagttcctcgacatactgggccgcatccgcgccgccatgcccgacgcgcagatctccaccgacatcatcgtcggcttccccggcgaaaccgaagaggacttccagcagaccatggacgtggtgcgccaggcgcgcttctcctcggcgttcacgttcatctactcgccacgccccggcacgccggccgccgcaatggaacagattccgcgcgacgtggtgcaggaccggttcgaccgtctggtggcgttgcaggagcagatcaccgaagagaacctcgccacattcgagggccgcgacgtcgaagtgatgatcaccggcaaactcggcaagaaggacaccgacacccaccgtgtcaccggccgcgagaaaaccggcgtgctggtgcacatcggcgtgcctgaaggcgaaccggtacctgaaatcggcgatttcgtcacggccaccgtcacacacgccggccgccataatctgcttgccgaccccgacgtggccgccggccagacctattccgtgcggcactgagggggcgtatatgacgcaacgagtcgtctccatcgtcggtcccaccgcgtccggcaagacggggttgggcatcgccatcgcccggcgtctggccgaagcgggggagcgggccgaaatcgtgaacgcggacgcctaccagatgtaccgtggcatggatatcggcaccgccaaacccaccgccgaggaacaggcggccgtgccgcaccatctcatcgacatcatcgaccccgaagacacgatgagcgtggcccgattccagcagcttgcgcgcgagaccatcgccgacctgcaatcacgtggcatccggccgattctcgtcggcggctccggcttgtacgccagagcggccatcgatgacatcaccttccccggcaccgatcccgacgtgcgcacacgtcttgaggaacgcgagaaaaccgagggtgccggtgctttgttcgacgagttgcgggccaaagaccccgaggccgccgcgcgcatggacccacgcaatccacgccgcaccatccgtgcgctggaggtcatcgagcttaccggcaaaccgtattcggccagtctgccgcgctaccggtacgtgattccgtccgtgcagatcggactcgacctggaccgcccggatttggaccatcgcatcgatttgcgcaccaagcagatgtatgacgatgggttcatcgaagaagtcgaacggttgcgcccgcatctgggtgccaccgccgtacgtgcgctcggctatcagcagatcatcgacctgctggacggcatctgggatgtgaacgacgccttcgcggacatcgcacagaaaaccaagcgactcgcccgcaaacagatgggatggttcggccgtgacccgcgcatccactggctgcaggccctgaacccgaaactggtcgacaacgcgatggccattatcgcgcacgccgacgccggcgactacgacccgatcgacgcccgagccgacgaatacacccagcatcatctgggcgatatcacggcgtaggaatcagccaaaggccgatgcaatcacccgcaatcagtgtgcaggcccctgattccagccggcgatcaagaacacgcgcgtcggattcgccgggcgtagtatcgcgtcgaacatcgtctccagtgcagacgtgtcgccccgatatgccgagtgcttggcggagcgatactcttcgcgcgtcactgagccccagtcgagatcccagccggcgtcatgcgccaagcgtgaaccgaatatacgcagcaccatcgcattgccgccacggaacggatgcagataaccgagctcatcataaatagaagcgaacgcgtgaacgaacacgtcgcgatccaacgcatgcaggttgcgcttgtccgccaactccatcgcgatgttgtgcgcgccggtctcaatgagcccagccgggaagaacgcctcaggattcgcggctcgagcccggtcgttcgtcacctcgcgtgtggtgtttgaggtacgcaacttgcccgcatcctcaaacacgccttcgaacagccccttatgaatggcggtcagctcatccaagtcgccagacggattccatcgacgttccgccaacaacacggtacgtgcgaacaccgcatccgcccgatccgtggcatgatcatccagactgccggcagccagacgatcctttccggcagggtcggcggcggcgcgcagacgcatggcggtctgttcgtccgccacgtcgatgagatgggtcacgggcttcaagccgcgttcgtaggcagccgcggcgcgcatcgttgcctcgcccggcgtcatcgcttccagtgcgcagttcttgagtgcaaatgcgactgcgctcgcacgctctgcgggtgtcatgcaacccatgataaggcatattcgcgccccagcggggaatcgactcagacgaacgcggcgaatcggctgtcgggattcgtcaatcgaccatatcgtcacggtgtcgtcaccaaccatgcacccccgtactagtagaatcagacccgatatggcacgaacagcatcctccaacagcaccaaaccccgtaaatccaaagacaacgggtctacccatgatggcgaaaccaaggtccagcccgagcttgacctcgaacctgagccgttgtggaagaagatcctgctcgcgattccgcgcgcgttcggctccggcgtacgcgccgtcaccggcgtcggcgaatacgatccagcctaccgtcgtgatggtttgtgcttcctgctgctcgtgctcgccgtactgttctgcgcgtccgaatggttccgcgtcagcggtccattcggccagctgcttcacgccatcgcggccggtgtgcttggtctgatgagcgtcgtgctgccggtgttgctcgccgccgtggccttccgactcatgcgcaattccggtaaagggtccaataacccgcgtgtggtcaccggttgggtgctgctcatgtggtcgatttgttcgatcatcgacgtggcgatcgccgccgaccacaccggattcgacatcacgattctgcaatccgccggcggcctgttcggcttcttcctcggctcaccgctcgcctggggcctttccaacgtgttcgccatcatcattttcgtggtcgtcggcctgttctccttgctgatgattaccggcacccacgtcaccgatttgccggaggatgcgcgcaaaatcgccgctaaaatccagcgcaaaccgtatgtgccgatgggccaggagacggatgggagcgccagccagttccccaacgaggtccgtgtgggagataccactctcgcctttgccgacggtgttccctcgcatgacggcgacgatgacggcaacgacgacgatcaggccggcgatgcacggcccagcctgttcgcacgactgttcggccgcaaatccaagaccgaagacgacaaaactcttgacaagtatgctgccgacgatccgttcgaccgtgccgccagccagcatggtgccaccgccgaaaccccggtggtcgatccgatgaccggcgagattaccggtgcgcgaaccattgcatcgtcttcgtacgacggccgtccgcacctatccagccctgcgcctgctgccgatgcggatgatggcgacgcttcccgaacccgcgtcatcaccagtggccagaccgtcgccatgcccggtgggggagcggtagacgatccgtgggcacccagtgttgcccaggccggtactgtcgcgctcgcaggggcagccggtgcgatgggagcggccggagccgccggtgccgcggctgcggcagccgcgaccggagcctacgcgggtgccgatgcggacggcagcggagtcggccagggcgtgcccaatacgggcggccagccgaatgccaccgccggcaacgatacagacgacgacgccaataggccgtatcagttgcccgacctgaacctgctgaccaaaggccagccccatgcgatgcgcaccccggccaacgatcgcgtgatccgggcgctgacttccaccttcgaacagttcaacgtggatgccaaagtcgtcggcttcctgcgtggcccctcggtcacccaatatgaggtcgagcttggccccggtgtcaaggtggagaaagtcaccaacctgcagcgcaacatcgcctacgcggtggccagttcggatgtgcgtatcctttcaccgattcccggcaagtccgccatcggcatcgaaatcccgaacgaggatcgcgaaatcgtgcacttgggcgacgtactgcgctccgacaaggccgtgggcgatccgaacccgatgctctccggcatcggcaaggacgtcgaaggccacttcgtgaccgccgacctgaccaagatgccgcacctgctggtggccggtgccaccggttccggtaagtcgagttttatcaactcgatgctcacttcgatcatcatgcgtgccacgcccgaacaggtgcgtctgatcatggtggatcccaagcgcgtggaactgtccgcctacgcaggcatcccgcacctgctgaccccgatcatcaccgatccgaagaaagccgcacaggccctcgaatgggtggtcaaagagatggatgcacgctactccgacctcgaattcttcggattccgccacgtcaaggacttcaacgaggccgtgcgcgccggcaaggtacatgcgcccgccggctcccagcgcaaggtggccccctatccgtacatcctcgtggtggtcgacgagatggccgaccttatgatggtggccaagaacgatgtggaaagctccatccagcgcatcacccagctggcacgagccgccggtgtacatctggtgctcgccacccagcgtccgtccgtggacgtggtcaccggtctgatcaaggccaacattccatcccgactggcgttcgccacctcgtccgccaccgattcgcgagtcattcttgacacggtcggtgccgagaccctgattggtcagggcgatgcgttgttcctgccgatgggttccgccaagccgattcgtgtgcagggctcgtgggtgtccgaatccgagattcgcaaggccgtggagttcgtgcgcacccagcgcaagccgaaataccgcgaagacatcgaacagatggccaaggaagccgaaaagaaagacagcatggagcccgacgaggagatcggcgacgacatggacgtgctgctgcaggccgccgaactcgtggtcaccagccaattcggctccacctcgatgctgcagcgcaagctcagggtcggcttcgccaaggccggccgactcatggacctgctcgaatcgcgtggcgtggtcgggccgtccgaaggctcgaaggcccgcgaagtgctcgtccagccgcaggacctgccgcaggtgctcgccttcatccgaggcgaaaccagctcgctcgaagccaccgccccgcaacagcccgaactcggcgaataattcgccatcgaccttcctctgatgagggaggtgccccgaaggggcggagggagagaagcgcggccacgcggccatcagcacgcaacctgattcccgaataatagcagtcaatatccagccaatactcactcaaggtagaagtgtgggggtaacgtgaacactatggatgagaacacaatggacaagcagtcatcgcccaaatcatcgctgttcgacggatggaacgcgccgccgaacctagtcacctactcgcgcatcgtactcgtggtgattttcctgacactcgacattctcgccggtgcctggggtgagaacaacctgaccatgcgctgggtcgccgcggtgctgttcatcatcgccgcgtccaccgataaaatcgacggttggatggcccgcaaatacaatcaggtcaccgaaatgggcaagctcatggatccgatcgcggataagctgctcacttgcggcgcaatgattgtatgctccgcgttcggtgagctcggctggtgggtaaccatcctgttcctgattcgcgaaattggtatcaccgttatgcgtttcttcgtcatggagcgtccggacggcaaagtcatcgccgccgcatggcccggcaagctcaagaccgtattccagtgcgtgggtctgtccatgctgctgctgccgttctggtctctgggtaacggacaagccacgccgttctggatgaccgcttactacttcctgacctacgccatcatctacgtggcattggtcctgtgcctctactcgggtgccgtgtacctgtacaacacgttcgtcgccccgaagcggaagtgacggatattccaatgcgggaattgtgcgacagtctcgcggccggcatcctcaagatttgcgaggcgaacaatacgaaaatcgcctgcgctgaatccctgaccggtggcctgcttgccgatgcgttcgtgcgtattcccggcgcctccaacgtgttgttgggctccgctgtcacttacgacatcaatgccaaggcctcgatcctgcacgtggacaaggccctattggatcgagaaggtgccgtacaccccgaagtcgcccggcagatggccgtcggtaccgctcgcctatacagccagccggaatacggcgaccgaatcatcggcctttccaccaccggcgtggccggccccggtccggacggtgataagccggccggactggtgtatgtgggcctgcgcatccccgcaagcctcaccgcggaccatgccgaagtgctcaaagccgtcgaactccatcttgatggcatgcgcgaagaggttcgtcgcctcaccgtattccacgttctgcaaaacttgagtctattcacagcacacgcttcacgcgggttttgacgagtggtgagaatcgttggaatggtgcggaaaacgtaggtggcagtaggcctcatacgggtttcattgcgtggtgctgagttgcgggaatacccgcgttatgccgcgttttacacccagatagagtggactatagagtggactcccaacagggagggaacccaatggccgcaacgaaaagacgccgcaccaagggcgcggggggagtgttcagggacaaggccggcaaatggcatttccgcaccgagatcacggccgaccccggcaccgggcgccgccgcatcatcgagaccacgggactggtcaaatccgacgcccgccaacgccacgagaacaagctcagggaatacgagcgcacgggcatcatccattccaatcagtcgccctacctgcgcgactacatcatccgatggtgcgggcagcgccgccgcgacctgaaacccaacacctggtacaacctcgacaagcggtgcaacatcatcgccaatattatcgggggagtgcggctcgccgagctcacgcccgcgcacgtgcgcctcatgatggacaggctcggccgaacccgcgcgccgcgaaccgtgcgcgaataccacgggatactcaaacaggcgctcgacgacgccgaactcgaggagctcatcgaccgcaacccctgtcgcagggtcaggccgccacgctacgaggagaccccgcagaggatactcgacgaatcacagcccaaggaactgatcgcagcggccgtcaaggcacccatggccggaggaaggcgaggcccgcacgactccccggaggacaccgagatgtgggccatcctgttcgaactcgcgttcgccacaggcatgagggaaggcgaacgatacgcgctcatgccctacgagctcgaactgcgcgacggcatacccggcatcttcgtccaacagcagctccaggactacgtcggcggcgccgacgcggtgatacccaaatggcacaacgccgtccacgtggtcggcggactctggctcgtaccacccaaatccaagaaaggcgtacgcttcgtgcccatcacatggaacctgtggaaccggctgtggaaccgcatcatcacgttcggcatgcacccccaccagttcatcttcaacaacctcctcggccgacccatacgacaggaacaggaaaaccgacgctggagaaacgccctccaagcagccggcctcccatacgtcaaaatccactccgcccgccactggacagccaccagagtcgcagaatcaggagccagcgaagacgaacgcatggccgtactcggccacaccgacatccaaatgacagcccgctacacccactggggcaccaaggcgctcgccgacatgatgcgcgaagccatacccagcctcacggatgacagtgatgacgtgtcttgaaatgccgtgttcaacacccgcagtgccgcgctcgtatcattttgcgacacgcgcgggcaatccaaaaatgggacgaacttatgcacattccgataaaaaatgtgcacaagttcatctaatacgtgtagattgaacatacagcatgcaacgggaagtcagggaaagagattgcatgctgcgataggagcaaccatcatggcaggcgcaatgtttttgaatcgcgtcatggcgcttatcggaaagtctgtcgtatccgattggcgtcgtggattcgcggcgtatccattagtcgtcggtatagaacgggctaatagatatcggaagaaacggtgatatcgcaacactgaaatgggaataaagaactccagacgcagaagccacgatatcgatgcggtccagcccgacgagccggacatctgggaagagggcaagttcacgccagacccggattgcgatcgctcacccgtcagataccgcaccgtcacgggacccgatggtttgccgacaaacgccagaaccatttacgtcgattggcgcaaaagcggtcatatccatcgattcttccagtgcatacaagtcaacttcgacgaagaaactattgatgattctcttgagattatcgaagatgacgattccattcccgatgagtccaaggaacgcgctgatatgtggcaagccgctgagatcgactgttcgcacaatatttgccacatacatcccaatgggcatcatccgccaagcggattgccggtggacaagcagttcatccatcggctggattctcttaaggatgtgaggtatgcatgtgcgatttcttcggtactgatcaacacgatagcaatcaacgcaatgaaaacatgtggaggtgaatgggatgaacgaacaatcaccggaattgcagaaggcgccgtacaaacactacgacgagctgaatctattcgaaactcgcattgacatatccatgtcaatgggattgctcgatgacgtgctgaccgttcgtgacgagcaagggaactgtcccatcgtcgtcgcattgggagaggaaaagctctactttctcgtggaacgagtcaaagcaataggcggatgcgccaatatcctcatcaagatgggggatcaggtgacgatgattgcttctgaacatttcaacggcggaacatccgacgccgaggacttgtccgatatctccgaatgggaaaacggcgataccaccattgccatgttcgtgacatatctcaggaccaaaccaaacggcgtgataatgccgcgaagcctgcccaaaggacccgaaacaaaaatgctgctgggggaaaaaccagtatcaatggaatcgatcccggcacttgtctgaatccctacaaaccaaaccgccccggcgctcgcagagcgaccggggcggtttcgtgtttagggcttgatccgcccgacacgggatttattgcttggccgtcttgacggtgatggtggtgccgagcgcggtggtctcccagctcacgccgtcggcctcgctgtaggtgaagtccttggtggcgtcctgcgaggcgagcagggattgagccatggtttcggtgtcgccctggctggtccacttccagtcgccggccttggtcggtgcctgataggtgcccttccaatagaggctcttggtgtcggtgccgatccagttgacctcgatggtgtcgccgctgatggtggcttccatgtatgagttcgggtcgttggaattggtctgcttccatgtgccggtcagatcggccggctggggtttgggctcttccttattggtctcggtctttgacgtgccatcggatttggccggcgcatcggccgtagtgcttcccctgcaagcggacagaccggtaagcaacatcgccgcaacaagcagtgcgattgcctttttcatgatgggtctcccctcgtgccggacattgtcgtccgacatgactcaatcatatagcgaaacacaagaaccaaggactcatcccggcgctcgcggtgagtcgccgggatgagtccttatatggcccggaagctacgcggcgagttccacgggagcccgctcttccaatttggagtaggggatgacggtcacaccgtagttgcggaacgcggtgagcgcgccgcgctgcaacggcgtctgccggtcgtcgccgatgactatcagccgggaatccctgcgcttgggatccttcttcgtgtcatcccaaccgaacatgatgtccttcacggcgtccttgtcgaatcggttcggagcctggcagaaccgggtcggatggttggcgctgcgctggaacaggaagtcgaagttgtgttcgtagctggatacgccgcgaatgcccacgttcggagtgtagaacacctggcatgagtcgagcttcaacgccacatcatcggcgaaataggacagcaccctcttctgcgaggtctccagcatggagccgatatcggtcaacgcctgcacgaaacggttcatcgcgtccggacggcttccttcggtctccagggtgatctgcccgtcatcgccgaccatggcgccgaaacgcagggcgagacgattgatgcgctcgcgtctcgattcggtgatggtgacgccgttgaggtcgaaggacgccatcgtgtacccgtcgtcggtgaacgaggtgactccgtcggtggtgcggacgtagaagcaaaggtcgtcgttggagcggtcgaggaacggcaaagtgacctcgcgccattcgccgacgttgcgcacggatgattcgcgtttgagccattcgccgtattccgcgatgagctcgtcggtggcggtggtctcgttcatatcagtttctcctggaagtccggtctgcggatgacgttgaatctgtccaacagccttattgtatcgttcacgaagtccggtgattcgatgtccgcagtctgggcgttccagtcgtcctcgccttccttgtagatgtgccagtgggttccgctgattctctcgccgtcggggttcgtgtgggtcgagccgttcacgcatagccgcagcaggggcacgccgagccgtgtgattcgagcggacatggagtggcggtcggcgttgatcgcgcccttgaacacggctatggtgaacttctccccgtcgtcgccgagcacgtggaattcggcgttgcgttctcccgtcgcgggcatgacgaacagcttctccaccgagttcttcacctcggcgacgagacgttccgcctcgtcctgcgaaagcgtgtagatcggtttgcggttcttcctcgacatttcccttttcctatctgaacgcggtcgaatgaatcactcgacgttaaccttgtcctcggccttgatacggtcggcccaagcgtcgatatcgatgtcctcatgaccggcttccggggattgtccatcaacaacaaagcgctcgccagcgggtttctttgttgatgcggtttgttgttcgagttccatacgtcttgcctcggtgatgatctcgcgcagggtttgcaccggatcggcaccgcaagcgtcgcaaatggccaaatattccgacatcctgaccggggccttgaggcctagccgtatatcgcgaatgcggttgtagctcacaatgtcccctattttggcggccattgtgcggtctgaatatccgctttgcttgatgagctgagtcacttttctgtatgcagcttgatcgagaacggaccacgaaaattttttcatgaactaattctatacgcgacacgctatcacatgcaaacaatgctatcacgtgctatcttaaaaccgtcgttagatagcacgtgatagcagaggtggttgagatggcacggatcgattacaggaagattccggtcagggagctgtatctgtacatgaatctcgtgatgggtttctgcacggatatgcgtcgcctgttgcgcgagaggaatctgaccgccgaggcaattgacaagtacgagatgacggcggtcaacaacctgattgtcgaggtcaaccaccgatcgcaggcagcacctgagcagcagtcaggccccacaccacagcgttcaccccgacctgagcgataagaggaaccatgaactgctcattgaacttttcccacacgggatgcttcttcgtttttgtttcggccactcgcaatgcgttgcacagtcggtcgaacgccaccgacagcttgaagtcgccggtcagctcgtattcgtccaacgcttcgctggcttcgcgaatcaaccgggacaagtacgccagcaagtcggagggcagactgtcatccgcacggacgcatttgacggcttcctcgatcatgttccgcattttttgccgggcatcctcggagtacgagacggtggaagccgatagtttttcggctacggattgcaatcccatgagatcgccgtcggtaagtttctcctgcgttttcgtatgggtgaacatcgacatgtcccactgcagttcatcaacgtccatgaacgtgttcaatgccgatttcttccaccgttcaaggcatgacctcatcagatgcacatccacacccatggactcccatgagtcaatcgctgactcgacttcgctgagggcttgcacgacatcaggaaaccgatacccctgcctgtcggcttcgtcagtcgtcccggcctcgaaaaagccaatcagatactcagctgcattcaccgtaaccaccaatcagtcaaaggaactagcacatgtctaacctaccagcagttgaagccacgaaacgtgccgtgcacgacacccgcacccgagtgctcctatccaaaaccaaaatgaccagcatcgccgaagcctgcggccgcaaccgcatgaccgtcgccaaatggttagacggcgacgacatcagcctcgccgcatacatcgccgcacaacaactctcaggcggcgacccaatcgaaacactcgccaacgcgctcaacgccgacaacaccgatcccgcgctcgccgccgagaacatcatcccggcgctcgccgaaggaggtgcgaaatgagtggatataaggcaacccctgcggtgcaagcgcaggggtgtggtcacggcccgttctcagatctgttcgaagctgatggggcatccgggcgtccagtacgcagttacgtcgttcccggaatccgcgagcttgccgctgaagacgacccctccttgcgtcctggtcgacgtggtgagcttctgggagatcgcctgcgtttcggcgtcgtcgaacggtccgatcagctcgtcgttaaaacggatattccattgcgccatgtaatcacctcccttctttgcgtgggtgccctcattgtctcgctcgaactcgccggcaaggaggtgaagtgatgggaaccgtcagcacccgcattgaagaaggggacggtttcaaagtcctgagatacgggctcggaagcatcgttctcatcatcggctatccccagtcggaaagcgacctgatcgacgcgcgagatgccatcgccaaacagttcgattacgaaatcagcatgaacgggcgacggcacggcggacatcgttccgtccgcgccgccgccatgccggagtcagtcgtcgatctcaaccagcgaccaccacagggcggcacgcggattgagatagataagagacccctcggggacaccgagagcccgacctcgaaccgaaaccacgccacccgacgcggcggcgctctccaattcatcgagaatcttcgacggatactcttctcccgctaaatcgacaaaccgtcgcttatcggcggtcgtctcaaacacgagtcgatacgtcattattcttcacctcctctcattgctggtagttaggcaatgtccagcttaggggaggtgggccaacgcataaatcaaggaaaggaagtccgggatgcccataacagctgaaggagtgcgcacggacggcaatccggtgccgttgtgggagcgcgagacgttgacgctgccgcaggccgcgcaggtgttcaacatcgattacgacggcctgctggtcgcggtgaaccagcgtgacgtcgatgtgtttcgcccgttgaacaagcggggggagcccggtcgcaggcatgtgcgcaaggaagagatgcgccgttacatcaaaacattggaggaatagatggactcccatgattacgggcatcacgcctccggatacaggaaggccgatggcggcccgtcgaaacggttcatgcgtcacctgacggtgctggcggtcgtcctcgtggcctgtctggtgtgggtgatgacgcacgaggcatgccgctacccgttggaaaacggcatctgttcgctggtcgctttcattggcgtgcccattcgcctgatctgcctgctcgaggccgaggcgggcgtcgaataaggacttgccggggttcctattctttccttccccggcaatcgacaaggacagtcgctaacaccatcgcgtcgtactcggagcagcgggtgcggcgcatgtggggccggcaggttcgcccccgctggagatcacgcggtgtcatgtacgcggggcaaacagcgggatgccgttcgattcggctcggtccacgaaatcatttcaaccatcgaggagagggggtgtgatgacgcaatccgattacgaccatcgcgaggaaggcgaaagcctgttcgaatggccgttggacagtgcggggatgcgcatgggtgccggcgagctattggacagcctgctcgccaccatccagcatctcaaccgcacggacgcatggccgctgaccatactgccgccccggttcggcgatgtgctggtcgaccgggaacgccgccagatctcggcggtctgcctgtggaaacgcaaaccagtcaaaacccataaggagggatagatgtgcgagaaacccgaaaccgaaaccgtgacgccgcgggtggccttcgccaccatattgcagtcgctggtggccgattcgccgaacaagccaacgctgcccgtgatgctgtccatgcttgaccaagcgatggatcataccgggctgcgactggagcgcgatgccacgccgacggactatgaggacgatgtggcggaagcgcgccgcggcctctcgcgcaaggcgtatgacgtggcgagcctgctggccgacggcgtggccggtgacggcgactgggaactgttcgacctggccgacgaggcacgttccgccgccgttgccctgctgcgcgcgttggacggtgatgcgtgatggccggggagagcgctctcacgatcatcggcaacctgaccgccgacccggagctgcgcaccacgggcggcggcgcgaccgtggcgagcttcacgatcgcttcgaccccgcgcaactggaaccggcagaccaaccagttcgaggacgggcaggcattattcatgcgctgctccgcgtggggcgacatggccggccattgcgtccagtccctgaagaagggcatgcgagtgatcgcccagggccgactgagacagcactcgtaccaggcgcaggacggctcccagcgcacggtcatcgacatgaccgtcgacgagataggcccctcattgaggtatgcgaccgccgctgtcaaccgtgtccaatccggtcgcggctattccggtggctcgacctatggggatccggccaaacccgccaaccagcaacaaggctggcagaacggttccccggcccagaaccccggcatgccggaaggtgacccgtgggctcagccggcacccgcctctcctggcgccacgttcggcgcttccaacgttttttcatcagacagccaagaccccgaattctaaggagattcaatgtcacgaaagaaaaagaccgatggcgtgcaggacgcgctgatacccgacgagatcacgccgctcatgctgctcgccctgacagccaaggcatcacgcatgaaggacgccgcggccgcgttccgcatcgcggccagcaagatgctcgacctggccaccaaggatgaatacatcgaaaaatacaagaacatcgaccccatcaccgacgccttgtacgacgcctgcgatctctcgcagcacatcttcgacgccgccaacgcggtcaacgacctcattaactatccggtcgaggcccgcgagcgcgtggtgaaggcggatatcgagcgcagtttgttggatccgtggcgtgatctgcccacgtctggtgtggatccggataccggtgaaatcaaggaggactgaatcatgagcaaacgcaagcacggacgccagcaactggagcatgagcgccaacgccggcgcaggaagcgcatgccgcacctgcccgtacaccagaatctatcgatcaaggagcagtgacccgattcagtggctatcaacatcatcgatatcaacgtaaagagcctcatcccgaacccgaacaacccccgcaaagacgtgggcgatgtcaccgaactcgccgacagcatcaaggagcagggcctgcagcaggcgcttgtggtaacccccgaccatgaggagcacggcgagcgcatgtttcgtgtggtgattggtcatcgtcgtttggcggcgtgcaagctggctggcattgaacgggtgccgtgtgttgtgcgtgagttggatgcgaagaccgagcgtgagctgatgctggtggagaactgccagcgttccgatttgacgccgttggaggaggctgacgggtatcagggtttgcttgacctgggtgccggtgtgggtgagcttgcggcgaagacgggccgttcggagtcgttcgtgcgtggccggttgcggatcgcgcgcatccctgccgaggtgcgttccgggtcgaaggggttcgcccagttgtccctctcccagttggatgagttggcggagttcgaggatcatcccgacatgatgagggagctggcttcgcaggccgggtcgaacaattgggcgtggaaggccaatcagctgcgccagcggttgaaggacgaggcgtggcgtgtggcggtgcgtgccgtgttgcgtgaattgcatgtggtcgtggaggagcctgaatccggttcggtgtggtcggtgccggatggctgcctgttctgtgacgtgttccatggccggcccgaggatctggccgactggtggaagcagtggcgggtgaagcatccgacggacgggcccgtggtgcgcgtcgccgacaccacggtgtacgcgttcccgcgtatgagcgccgcgcagatcgccgaacgcgacgccagggacgcggcccgtgaacgcgagaacgccttggccgaggaacggttggaccggcggaaacgattcgagcatgacgccacgcaattgcgtctcgtctggatcagggagcacgccacccggttcaacggcggacaactgcgcaaagccaacacccgtttgagcctgctcgtcctgaccggcaccgacggctattctggcctcatcgccagccgcaggtgggacaacgacgagagggtgctcgacgcctacaacgcgctgaccaccccattgccggtcatcgaggacggcgacgtggaactctactgcgagcagaacctcacggaactgcatcgccgccagaacgtggagggggccgcgaaccgtgagctcctgctcatcctgtgcgcccaaatggaagccatcatcgaccacagcacgtgggcagacaaggacgacatcaccatcgcccaagcctactatcaggcgctcgaagacctcggataccccatctcggacgaggaaaacaaagcactcaaaggcgaatatctgcccgaagacgatgaagcggagtgagccatgacatggacccagatagacgacgggctcaacttcagcccgcagaccatgcccggcatggtatcaaacgccgcgttgggcctatgggtcagactctgcgtgcacaccgcataccagctgcgatttcccgcattcgacggcgcattcgacctcacggtcgtgcgctcgctgaaaggcaacgcacgacaggtgacggaactggaggccgcgggaatgctcgaaccggcgctcgccgccggccggtggatggtggtcgaggccgacaccctgatgaaattcggcggcacctccggcagcgaactcaaggagaaaagagccaaggccgggcatgccggcggcgtcgcttcgggcgagtctcggcgaagcaaacgcgaagcaaatgcttcgaagcaaaacgaagcaagtgcttcaagcaaaccgcgaagcaaaaccgaagcaaaccatgaagcaaaagacgaagcaaaccatgaagcaaaaccgaagcaaacgtctgaagcaaaacgaagcaattgcttcgaagcaaacgaagcaaccggtcctaacctaaccatacctagccttacctcccctgtagccccctccgcaccgaacgccgagccgagccaagccgtggccgaatccggccacgccaggccggtgccgagcctcgccgaagccgaggccttggccgaggccgacccgttcgcgttcgcctgggaccggtacccgagccataccggcagccgcgaccaagcccaaaacctgtggcaggccgtcaccagcggcagcgacccgaccatgccccaggccgagccgagccagctgctcggcgccgtcatccgctacgcccagaccgtgcgccaggacggcgaccggttcgtgccgtcgatgcgcaaatggctcgaaaaccggcaatacacgcaatggctccaaagcgtgccgaaacgcaccgaatggggcggcgtcacccgccaatggctccaaacccacgccatcagccaagtccccgaaggctcgtggacggacagcgtcgaacagacgttctgggcccacgtcaaaaccggcgaagagccggagaccgtggcgcaacggctcgtgacggaaatcaacgaaaggcatcaagcatgagcgaccaacccacagctgcgaccctgcgcctcgtggaaggccgtgaaaacaaccggtgcatcgtctgcgaccgatacctacgcggcggcgaatggcccggcagcagccaccaccaccggaaacgccgcagccagacatacggcgaccccgaacggcacagcccctcgaacgtcatcgacgtgtgcggcacggacaacagcaccggatgccacggatgggtccaccagcaccccgaacaggcccgagcattgggctacctgctcaaaagctacgaccccgagccaagccaagtgcccgtgtacagctgccggcgcggctggatactgctcgacaccgacggccaatggcactcatgcccgccgcccgagggaatgcccaaccacccgcaaaccaaccgataaatcagcagaaaggaacactcatgatcaacgcctacgcggtcaccgtgcccggcgaactcgacaacgtggacttcacccgagaggacggcaccagcgtgaccatgctcatcccgcccgacataccggtgagcaccaggacaatcatcatcccgcagggcttcacccgcgaggaaacccgaaccatccagggagccatcgttcaggcgctcgccggaaaggagaagacgctatgatccccgagaaacccgaagccctgctatggatggacgtggagaccaccggcctcgatgcgaacatgtgttcgatactggagatcgggttgcgctgcaccagcctggacgccatgcacgaatacgggcggttcgaggccgtggtgcacatcggccgggagaccctgctgaccgtgcagccctccgccctggaactgcatctgaacaacggtctgctcgcccaatgcgaatcctgcgacccgctggccaactcacccagggtcatcgccgagcaggccctgcggttcatccaaggcatggccaccacgtacgtcctgcacccggccggcacgaacatcagccgtttcgacctgcccatggtcgaacgcttctgcatgacgggcttcggagaactgctgcactaccgcatgctggacgtcaccgcactgcgcctcgcagccaaagcctgcggccaagacccataccagcaccgcatgaaacccacgcaccgcgtccacgactgcctcgacagggacatcgcggaataccgccactacctcaccctcatgacggggccggcgctcgcagaaaaggaggaccggccatgaagccacgttgcatcctgtgccgcaagcccgtgcccgacaaccacacccgatgcgtcaaacactggctcaacaaccaggaccaatggatggaggacgaccaaccggcacacgagcactgcaccccacgaaggagacccgcatgagccacacggcacgaatctggacacaagaccaactcaccgaagcattggcgagcgcctgcgtgctggaaggcgtgagcatcctgcacctcggccaatactccgatacggccatccggaacctcaaggcggtggccagaaccatgtacgagaccagcggcatgccgaccatcgtggaggacgacgatgagtgacctcacccaacaggccctcgcggcgctcgccgacgcggggctgggcaacgagtcagccgccgaagcgttcgtcgtcggctaccaggccggctgggacaaggcgttcaacctggccatccgcatcgaaaacgaactcaacgcggacgagcccacagacgaggagatcgagacctgcgcccgagggttcttcgagggcacacccggccccaccaactgggacgccgtcagcgaagtctccaaacaggcatggctgcacgcggccaaaaaggcgctcgcagccgtcaacgccatgaaaacgaaggaacaacaatgaacgagaacacaaccctcaccgacatcatcgacgcggcgctcgccgccggatgccagatcagcgtgaccgtcacacccaaagacttctacgaacaggagacggaagaatgaacgtgagcgaaagcatcgactggcagcactcaacaccgagcgaactgttcctgcaccggttcgtcgccatcacgaagagcggccagacactggacggctacctttcctacttcccccaaaacggctggtggatcctccaggacgcggacaacctcaccaccgtcatcaaaccggacgccaacggcaaccccacactcaacaccgaactcttccgctccatcaacgtgctcaaggagacaagatgaaagaaattacattaatcaccaccgatttttacattagcgtgctcggaggcacgcgatgaagcgcggaagctggtcggtggaatccaccatcgggctcgtcttcaccatcgtcatcgccgtcatcgtcgcgatggtgctggccgtcatcggcctcaccgcctacgcggttacgaccccggcaccggaacagaccatcatccaacgggtcgaaaccacgggcgacgtgaaacgcctctgcatcgaagcccgcaccaataaccgtatcgatgccatgagctgccagctcatcgacccgcatacgggaggtgtgaagtgagcgcgatgaacaaccagcgtgggctgatactcaaatggcatcggagcaaggccgcgacacccgagtacacggcgaagctcctcggactgccgctgaacgaggtcatgtacatcatcgcccatccggaaacgtccgcaccccacaaggacgattccaccccggaattcatcgaaccattgatttgattcaacgcaaataaacgaatcattggaataccgccaatcccatccaatctggaccggcggatacgacgacgaggcaaataaaacgaaaccctccaccaaaggcggagggcatgtcagcaagcaaccagtttagccgatgtggaggggtttcgtgaactgccagaactgcaacaccataatcgaaaacgggtacgcgctgtgcacggcgtgcgagctgcgcttcgccggcacgctgctgcaattggcgcgtgacgtcacgccattgcatgacagcctcgacgccacattgcatccgggcgggcatgcgcccgtgcgcatccagacggccacgccgcccacgcctatcaggctggacgtgctcgacctcatcgacatgctcgacagcaccgcacgcgaactctggcgttgcctcgacggcatcgacgcccttgactggcgcagggatccacgaacggaagacctgaaggccacgctcatcaaatgcgccggccaccccaagctcgccacgttcggcgacgccgacctctacatgcacgtcatcgacggcatcgcccgcaaagtcgatgccgcgttggacccgcccgaacaacgccgccgcgagatcggcacctgcgaactgtgcgggaccatgctcgccgcaggcgcggcagaccagtgggtcacgtgtcccgtgtgcgggagggaacagcgagcgcagaccgtcaaactcaggcgactcaagacactgtgctgggatgacagccggcgtggctctgcggccgagatagccaaagcgttcacggttgcggggatcacgctcaaacgcaacaccgtcaacgtgtggcgtaggcgcggcaagctcgatgtcacgctggagggcatcgcctacagcagcgtctacaggcttgccatcagcggcgaacccgtggacgagccgccgagtgacaaggccagaccgtccgaaggacttgacaaatgaacgactgtcaccgatgattgcagtggcagaagtgtcgaaaaacccagctcacgtggctgggttttcgcgtatctgaccgcattgcatggggcgagagtactccgccggcacgtccaaagcgccggtgatgttcgccccgccactcttttcatttgattgtgaggcgatgacgccatgacaatgccaggcatgccgaccatcagcctgcagatcacgtgcagggggaataccctcgccgacatcgacgccctcccggtgcccgtgagcgtcaccccggccgggcatattgtggtcgaccccctcgaacccatcgtgcgccgggccgtgcaggcgttcgcggacgcatggcagcggtcgtgcgacaaggccgggttatgagcggacggcgtggcaaccggcgtcatgccaatggctggcgacgccagcaggtcgtggcccgggtgctggcggcctatgacacgtgccacctgtgcggcaggcccgtggacaaatcattgccgccgggattgccgggctctcccgaggtggacgagatcatacccgtcagcaagggcggctcgccctacctgttcagcaactgccggctcgcgcaccgctggtgcaaccgtgtccgctccaaccacagcgtcgaatgggcgcgcgaacgcatcaaacagattcttcaacaggggcacccggccgacctgaaggccacctcgatgccattggtgacaagcggcgagtggtgaacgtggggaggagacccgtccggcccggtcgaagccccctcgggcgcagggccgatatctccccggcatgtcaaaacgtaacgccttggacggccgttacgttatcccgttacgtttttttggaggtgagcgcggtgatctgcgaggaatgcggccagccgttcaccccgtccggccgtggcaagaaagcgaagtactgttcggccaaatgcaagcagcgcgcctaccgcagggccaagcgcatgagccgcgtcaccacccctcccgccccggccggggacgtggaacatgagcccgaggcgatggacaccctcaccgccgccgatttcgaggcgatgatgaacgacggacccgaggactacgtgagcgtgctcaaacgcacgcaggcccggctcaaggaagccatgttcagcgccggcaccccgccgggcagcctgaccggcatcagcaaacagctgctcgccctgacccgcgaaatcgaacggctcgaaggcaaccccgcacaaggcatgacgacgcaagaagatccggaggacgacgatgacggagaattccgacccgaagctatctgaggtcgcacgccacatcgtcatgccctccggcatcgtcaccagcatgttccccaaggtcaacaagcgcgccaaagcatgcggcatccgctacgaccgctggcagcagggactgctgacgctcatcctcggccgaaggaaggacggcacgttcgccgcgtccgtcggcggcgtggtgttgagcatctgccgccagaccggcaagaccttcaccgtctccagcctcgtggtcatcctgtgcacgctcatccccgacctgaccgtcatctggaccgcgcaccacaaccgcaccaacagcaacacgttcgaccacgtgcgcactctggtacgcaaccccgcgctcatcggatacctcgaccactccggccgcaccgacggcgtgcgcggcggcaacggcatgcaggaaatcaccttcgccaacggcagcaagatactgttcggcgcacgagcccagggcttcgcccgaggcaacgacgccgtagacatcatcgtgttcgacgaagcacagatcctgaccgaacaggccatcagcgacatggtgcccgccaccaacaccagccccaacgcgctcgtcctctacatcggcaccccaccgcgccccgccgaccccggcgaagcgttcacggaacgccgccgccaggcgctcgccggcgaggacgacatgctctacgtggaattctccgccgaccgcgacgccgacagcgacgaccgcgcccaatggaggaaagccaacccgagcttcccgcgccgcaccagcgaaaccagcatgctgcgcatgcaacgccagctcggcaaggacagcttccgccgcgaggcactgggcatctgggacgagaccaccaccagccaggccatcaacccccagcaatgggccaaagccgccaccggcacacccaacatcaaaggactgatcggctacgcgctcgacatgaaacccgaccgcagctcgttggccatcggcggagccgtcaaccacagggacggcaccgcgcacatcgaactgcgccgcttcgaggccacccaatccaaaggcacccaatgggcggtcgactacatcgccgaccactggccgcgcaccgcgagcgtggccatcgactcgcaatcacccgccatgagcctgctggccgacctcaaagcccggcacgtgaaagtcatcgtcaccaactacagcgacatgggccgcgcctgcggcaaattcctcgacatgctcagagacggcaaactcacccacctgccggacgacaaagcaccggcgctcgccacggccgtggccaacgccaccacacgcagcatcggcaaatccggcgccgtcggatggaacccgatgggcagcgacatcgacataagcccgctcgtggcatgcacgctcgccctctacggcacgaccataaccaaacgagacccggaccgagtacaggaggtcatgatcggatgagcgaacaatccatcagcttcggcaacccctacctgtccaccggctcctcgtccgtgacgcacatcgccaacgtgcccgacgacgacatggccgacatcacccgcctactggaactctggcgcaacaaatacccccgcaacctgctgcgctccgcgttctacgacgccaaacaacggttcaacaacctgggcatcagcatcccgaacatcgtcgcccagaaagccggcgtcgtggtcggctggccacagaaaagcgtgcgcgcgctcgccgacaagagcgtgttcgagggattcgagaccgccgccggggccgacaaccacggcatcgacgagatcatgcgcatgaacgagctcgaaaccgacatgagcgaggccgtcatcagctgctacaagcactcctgcagcttcctgaccatcgactacgacccggacgacaacgagcgcatcctcatcaccccgcgctcggccgactggtccgccgcactatgggacaacgaacgccgccgcatcaaagccgcgctgaccatcaccgacagcgacaaatacggcaacatcaccgcattcaacgcatggctgcccggccgcaactacgcctgcatgaaaaccggatacgggtgggaagcggaaccccaatacaaccggctcgaccgcgtcgccgtggtgcccatcgtctacgacaagcagatggaccgccccttcggccgctcccgcatcaaccgcgccctcatgaacctgaccgacatggccatgcgcaccatggtccgcatggaagcatccgccgaattctactcggtccccaaaatatggttcctcggcctgagccgcgaatccttccaacaggacacgtggaacgcgctcgtcagcagcatcaacgcggtcagccgcgacatcaacggcgacatccccgaactcaagcaggtctcccaggcatcgatgcaaccccacggcgacatgctcgaaaccatcgccatgctcgcctcggccgaaaccgacatcccacccgaacaactcggcatacgactggccaaccccaccagcgccgaagcgctcgccgccgccgagaaccagctgacgcgcaccgcgaaccggcagaaccgcatgttctcccgccagctcctcaacgccatgggcatggccgtgcaactgcgcgacaacagcccgcagccgccagacctgaccggcatccgccccctgtgggcgccgacccgcgaggtgagcgacgcggcaagagccgactactacaccaaggtcgccggcgtgaacggcgactgggcggattccgacgtgggactggccaagctcggactcacggccggcgagctccaatcgttccgcgcctaccagcagcggatgaaggcccaacggaacatcgaccagctcaaacagcagcggatgaacccgcaggacacggaggcggctgatggcagcgaatccgaaggccccgtcggaactgcaacggctgctggacaaggcgtacagggactaccagaccgaccttgacaacctcagggagggcgcggccgacgtcatcgagaacatggtcgaccgcgaccctttgaacgtcaaggacgcgatccgcgacttctcccgagacgcctcccagctggcgaacgaatactacgacaccgtgcgcggcctgtggggcgaatacgcgggcgtccggctcgacgacttcgaccacacgcggctcatcgaccccgaccgcgccctctggcaggtgcagggcggcttcaacaacaccgactacgccggcctgacctacacgcaggtcaagaacgggcagtcgcgcgcgggagccacgatcgacgacctgtggcccgatctgggcaacccggatgacgcgatgcagttcgtcgccgacatggtcaacgcctccgcacgcctgaccacccaacgcaacatgcgcatcgacccgtcgaaaccacgatgggcaagagtgccgcgcggagcaaggacatgcgcattctgcaccatgctcgcctcacggggcttcacctacctgagcgaggactcggcaggcctggagatgcaataccaccgggactgcgactgccagatcgtccccagctggggacgccagacactcgccggatacaaccccgaacggctcaccgccatgtggcaggaagccagcaaggaaggcggcgactaccgggagaagctcaagcgcatgcgccgggacaatcccatggcgttcacggacggcgtttacccgacgccgaccatgccgtgggagcagtccgtcagactcctgtcaatgaagggagagccaaaaggcactgcggaatcctggtaccggcgccagctcgccgtcggcgtcgacccgagcagggaaatcctcgaacggcacgagatcgtgttcctcgagaagttccagaagctgggcgaggaatacgagtggataccgaaaagccatgatggcaagcccagcaacgacttccactggctgagccacgaatgcgacgccgaactgaaatcaccagcaagcctgaaatacaggaacgtggcccaacgcatcaacgacgccgtcgtcggcggcgtcgaacagggcgttgtcaaggacgtgttcgtactggacttcggaagcacgaaactgcccgacaagttcgtcaaccaattgtcgctgtacaacgcccgtcatgaatcccacatcaaagagctgtgggtgttcgactcggaaggattccaccaaatcgtattgaaatagaagaacggggataaccccccggattatgtgccggtctcaagagccggttacgtgggatccccgttacctcgattctaccatacggcgggttgccggagaggccgatcggggccgactgtaaatcggctgcatcacgccacgcaggttcgaatcctgcacccgccactccacaccacccgcacgggtggtttttacgcccggaacgggccccatcaaccacaaaggagaaccatcatgcacgacatgccgcactggcaccgattccgcaacaaccttcgtctcatcgattccggcgcaggcgaaggcggctccggcgaccccgcaacgggagacccggccgaccccggcgaggacatcgactggaaggcgaagttcgaggagcagcgcgcccactcgcgcaaatgggagcagcgcgccaaggacaacagcaaggccgccgaggaactgcaacagttcaaggactcgcagctgtccgaagccgagaaggccgccaagcgcatcaaggaactcgaagccgccaacgccgcctacgaggcggaacgacagcagaacgagtggaaggcgcaggtctccaaggagaccggcgtgcccgcctcgctgctgcacggcgacacgctcgaggccatgaccgcgaacgcgaaggccatcgaccagtacgcgcaccccaagcccaagggcatgccccaccagggcaagacccccgacggcaaggccgccggcgccgacgaacgcgcatgggccgacgacctgttctccaacctctaaacgcaatcatcccccagaaaggaacaacatcatggcaatggacaccagcaaactccacctgcccaagaccgtcgccacggccgtcgtcaacaaggtcaaggagacatcgaccatcgcggccctgtccccgagcagcccgcagatcttcaccgacaaggaatacatgatcttcaacggcgccgccgaggccgacgtgaccgccgaaggccagaccaagagctcctacgagcaagacctgaactacgtgagcggcaagacgttcaaggtgcagaccaccacccgcgtcaccagcgagctcaaatgggccgacgaggacaaccgcttccagatcatccagtccatccaggccgaccaggccgaggccatcggccgcgccctcgactacgtcgtctaccacgccgtcaaccccaagaccggcgggccgctcaccggcttcgacgcgctcacggccagagccatgcaggtcaccgccggagacgacgacatcaccaacgtcgacaacctggccgaccagctcaacgagacctacgacatcaacggcatcgccatcagccgcacgtgggcctcccgtctgcgcaagatccgcgtacccgccaccggcatgcgctattacccggagatcccgctcaacctgcaggtcggcaccctcgacggcatcaaggccgccaccagcgccaccgtcaacggggccaaggccaagacacccacccacgtgctcgccatcatgggcgatttcagcctcatcaaatggggcatggtgcgagacatcacgtccgagatcatcccctacggcgaccccgaccagaccggcgtggacctcaaggcccacaaccagatcgcctaccgcaccgaggccatgttctcctacgcggtcgtcgaacccaaggcgttcgccgtgctcaagatctccacggaagaaggtgcctgatgagcgcgttcacccaggacttcatcgtccagaagacgaacaggaagaagcacaagccggccgccatggacgtgccggcgcgcctgtggaacccggatggcaccccgttcgctggcggctcatcaacgcctgcggacggcagtgtgacgaacgcgatgctggcgggaggcatcaccgcggacaaactcgccgcgggcgtgatcccgaccgtcccgaaggccgcgtatgtggccgacccggccggcgatacgccgacgaaggccgaatacgtggccttgcgcgacgctctcgtcacggcgggtctcatgcgcccaaaagcgtgaccaccgtcgacggggacatcacgcccgtgctcaccagaatcggataaaggaggaccatatggacccgtccgtttcgttcgccacgcattccaacctggaagaccggtggcacaagctgcttccggaggagcgggcgcaggcggacatcctgctcgcggacgcgagcgagatcatccgcaaccgcgtccgcccctaccccgagacacatgacccggcgtggtggctcgcgcatgagcgcgggctcgagctcgtgtgctgccagatggtgcgcacggccatggaggcgcaggtgtccggtggacagaccggcgtcacccaatccacggagacgaccggcccgttctccagcacctactcgtggctgagccccgacgggtatctgaggttcacggacgacatgctgcgcaacctcggattgtccggccaacgcatgtggtcgatagacatggcggaaggatcgcatcatggagcgtgttgacgtgtaccggggcgcggccgaggtggatgcagatgggaacccggtgcagggagagatgcggcatgtggcctcgctgatgggtttcgcggagccggtggagacttcgcagtccccgggcgcggactcgcagggcgtggcccgccgctacaccctgtacttccgtggtcccgagcccacgggcatccttgatacggattgcctcgtggtgcgcggcaagccgttgatggttgacgggccgccgctcgaatggtggaggcacgggcgtcatatcggcgacgtggtcaacgcgttcgtcagggaaggatgaatcatggccaagaaagtcagggtcgtattgaaccggaaggctttcggcacggaggtgctgcacaaggccgtcaagccggtcatggatgacgtgcaggagcaggtggagggcatggcggcggtggatccggcgatcaaggtgtaccgcaacgaggacactgaccgcaccaacgtggtcgccaccgctccggccgcgttcgaacaggcccacggagtgctgagccagatgctgggcatggtggtcgtatgagcgtcatccggccacccgtccgtccccggcgcgtggaacccgtgctgctcgaacgtctgcgcgaccggttccatgacgttgagttcggcaccgtccgcaaccggggcaatccgtccagggaatgcgtgctggtcgccgtgccgggccagaaggccacccccgtcagccagcaggcgcgtttgcgcatctccgtgtgggtgcgccgcgacgacgggaccggcgacatcgacgccgcgcagaacctcgccgccgacatcgaactgtacctgaccggcctgtatccgccaaggccggtcgtcaccatcgaccacgagtcggggccgatccgcatgagcgacgagaacggctgcctcatggcgtacctcacgctcctgctcaccgtcgaaaccaaccaagcataatcatcgaaaggcgtatggcaaatggccacagacacttcgtacatcaccagcggcaaccgcgccgacctggtcaaactcatcaaggactacgcgctcttcctgtggaagctcgacgatccaaacatccccgagatgccggactccgagaaatggacgccgccggagggcaagaagcctgtcggctacaacagcgaggacggcgcggtactgcaccccgagccgggcgacgagaccgagatcaagggccacaacggcgacatcgtggtctccgaacaggagcccggctactggaccctgcagatacccggcatcgaatgccgtcaggacatcgccgaagcctacttcggcgtcaaggccgacaccgacggcaacttccatgtcagggacgcggccacgaacatcgaatacatggccgtgctcgcatgcctcgaccagtacggcaaccccatcgtgctgcccatcggcaaatgcaaggtctccgaccgcgacgacatgaccctcgtatccacggaggtcgtgaccttcaacgtcacgttcaagatgttcaaggcctcggacggctgcatgttccacgtctatggtctgctcgcggccgagaaggccggactggccaccaaggtcgactcgctggccgccaccccgaacacgctgaccgtcgccgccggccgcaccgcgacgttcaacgtgaccgtctccccggcgaacgccaagggctggaccatcaccgccacaagcggcgacaccgcgaaggccaccgccaccgtcaacgacaacaccgtcaccgtgaccggcaaggccgccaccgcaaccggcaaacccgtcaccatcaccgccaccgccggcggcaagaacgtgaccgtgcccgtcaccgtcaccgcctgaccctgacattcttccccgcccgcaccgatggcggtccctgcggacggggaaccccacccaccagaccgccgcacacacttttttcaggagaccgccatgagcgcagaaaacaagaccatcgaaatcgaacccgacatcaacaccgacgccgaacagcagcccgacgtatgcctcagcctcaagggactcgacaccgaagtcacactccccaacctcaactccgccgacctgcccatcgaactggtcaacgtcgtgctcatcgtcaaaagcaaggtcgtcctctccgaggaggagacgttccacgccaccgccgtgttcctcgcctacctgcaggaaatgcagccgaccctgtggaacaagctgcggaaggccggcaacccgctcggctggatcagcgccatcgtcaaaggctgggccgaaggctcgggcctcgacccaaaatcgtttacctcctcatcctccatcaacagcatcactcggcgctgaccgccgactggctgacccgctaccggcgcgtctggaagccatgccacctcaacgcatggctcgacgcgccagccggccgcaaaccatccggcaacctcgactatgagagcgcatgggcgctcacccgcgaaatcttgcgcgaccacacctccaacagcttcgccgcactcgccggatggtcatacacgcccaccggagcggaaatcgcgctctgggaccagatggaactcgaaggccgactcaaacgcaaaggctaccggccatgggccgaccggagaaccgacccgttccgccgaccggccacggaaacccacgccgattatgaggcgcgcatggcccgccgcaaacgcctcaacgaccactaccacatcgaatgaccccgaccgccatcggggcctcccaaccacacaggagaagccccgatggcagaaagcagcatcggcgtcgtctacatcgaagtcgccccaagcggcaaagacttcggcaagaaactcgaaggcgacatcacccaagccgccgacaacgccgccaagaccggcggcaccagcatcctcggcaaattcggcggcgcattcggcaaaatcggcaaaatcggactcggcgccatcggcaccatcgccggaggcatcaccgcactcgccgccaaaggcggcttccaacgcgccctcgccatcgaaaacgcgcaggccaaactcaagggcctcggccacgactccaaaagcatcgccgaaatcatgaacaacgcgctcgccagcgtcaaaggcaccgcgttcggcctgggcgacgcggccaccgtggccgcgaccctgagcgccgccggcatcaaatccggcgaccagatgaccaacgtcctcaaaaccgtcgccgacaccgcacagatatcaggccgcagcctcaccgacatcggcaccatcttcagcagcgtcgccgcccgaggcaaactgcagggcgacgacatgctccaactcatgagctccggcgtacccgtcctccaactgctcgccaaacacctcggcaaaacctcggaagaggtctccgacatggtatccaaaggccagatcgacttccaaacattcgccgactccatgcaggaaggcctcggcggagccgcattggccgccggcgacaccttccaaggcgcgctcgccaacgtgaaggccgcgctcggccgactgggcgaaggccccggcaagctcgcgctcgaatcgttgcgcaaggcgttcaacgccgccatccccgccatcgacgcgttgagcggccagctcaccccgttcctcgacaagctcaacggccagctcgacccctacatcgacaaagcgataggcctgatcgaacggttcgcgaacggactgcaggacggcagcatcaccatccaggacatcgtcggacaggtcggccaactcgccggcgcgttcgccctgttcgccggcgtcggcggcaacgtggacaagatcaccaacgtgttcgacacgctcggcaaaatcggtgacggcgggttcggccagctcaccgggaaactcaagcagatgcccggccagctccagtcgagcctgacgggcctgcaccagttcaaatcgtatttcaacaaggacctgcgcgacgccctcgccgtcgacggcgacccgttcgccaacgccctcaaccgcatcacccaaggcactgacaggctcacaggcccgttcaaatcgttcggctcgaaaatcgccggcaccgacatcggccaatccgtcaccgcatgggggtcaaaactcaccagcggattcggcggagtgatctccaaaatcggcgactcgaaactcgccaccggattcacggcgctcgccggcaaagtcaagacggcggccacgccagccctatccggtctgggcgacatattcggcggtctgggcgacatcgtgggaccgaaggtgcaggcaggcctcggcaagatcggcggcatgttcggcagcttcttcagcccgggcaacttcctgaagttcctcggcatcggcgccatcatcgccgccctggtcgcgggactgggcatgctcgaccagagcatgggcgggcaattgttcgtgcagatcagcaacctgttcgcggaactgcccaccatgatcacggacggcatggcgaagatttccgccgtgctgccgggcatgatccagactgggtcgaacatcctgcttgccctgatcaacggcgtgaccgggagcctgccgcagctcgtctcggccgccgcgcagatcgtgagcatgctcgtacaggggctcgcccaggcgttgccgaccctcctgccggcagcggtgcagatgattaccacgctgatcacggcgctcatcgaacaggcccccatgctcatacagtccggcatgcagctcctgcaggggctcgtgcagggcatcatgaactcgctgcccacgctcatcgccgcgataccgcagattctgcaggcgctgctggatgcgttcacgaccgctctgcccacggtcctcaacatcggcgtggacatcatcctcaacatcgtcaacggcctggtctcagccatgccgcagctcgtcgcgatgctccccaccgtcatccagacgctgatatccacgctcaccagcaacctgccgggcatcgtccaggtcggcgtcaacgcgctggtcaagctcatcgacggcctgtctcaggccatcccgcagctcgtgggctacatcccgcagatcatcgcgtcgatcgtcaacacgctcgcctcgaaccttccacagattctgcaggccggcgcgcagatcatcatcaccctcgccgggggccttgccaaggccatcccgcagctcatcagccagatccccgccatcgtgcgctccatctggaacggtttcacaagcgtgaactggggcgaggtcggcatgaacatcatcaccggcatcgcctccggcgtcacatccgccgccggcaagctcgtggacgcggccgtcaacgccgccaaggacgcgctgaactgggtcaaggacaagctcggcatccattcgccgtcccgcgtgttccgcgaccaggtcggcgtgatgatcggccgcggcatggccgagggcatcgatcagagccagcaggtcgtcaaccgcagcctcgacaggatagccgccgggctcacgctcgacggccactcgttcggctcgccgctcatcggcggcgtcaccggcggcacgggaatgctgtgcgacgacagggggcagacggccacgcagaccgccctgctggaacagctgctcgccgcactggtcgccctgcacgcggacatcccgaccatgctgcaggcattggtcatcgaactcgacggacgagaagtgggaaggctggtacgcaagtatgcaaacgcttaaatacgtgtgcggctccaccggcgacgagatctcgttcgaaggccctatctacggggagacgatgccatcgttgagaggacgcgcgtggacgtacacgctcggcgcgcgcacccttaccggggtggcatggcaggcccgtgaactcacgcttacggtgaaggccgtggacggcgaaacccaattggaccggctgcgcatgctcaccgaccatgacgtgctcgcgcactccagggactccacgatatcgggcctgctgcgcgtggacgacgtgtgggagtgcagggcgctcatcaccaaaagcgaaccgcaatccatcacgccgcgcatcatcgaaacccaattgaccgtgacccaattgggcatgtggcgacgcagcctgccgaccgtcacctatgcgcccagcgaccccgacgcctaccagtatctcgatcacccgtatgacatggactacgattacgggccgccatccgccccgccggtgatagccgtggacgggttggacccgatgccgttccgcatgaccatatacgggccctgctcgaatccgaccgtcacgatcggcggcaaccagtaccggatcaccggtgacatccccggcggcgctcgcgtcgaggtggatgcggtggagggcgagcgttcggtggcgttcgtcaacgcggccggcgaccgggtcaactggttcgcgaacgcggaacgcggtgccggccttgattccggcagctacatcttccagccgttgccggcgggccgcgccgaagtgagctggccgggaggctacacgttcgaactcacgcccgtcgaggagaggagcgaaccaccgtggtcagcctcatagtcaccgacgcgaagcacaagccgttgcgcgcggtggacgactacacgctcgatctcgcctacggcagcgatgagaattcgttcaaactcacctgcctgccgcagccggagtccagcgcgctgatcatgatcgacggcaccgaatacggcgggttggtgaccgtgcgcaacacggacggcagcgtggagggccccacctggcatggcctgctctcacgccgcatcctccaacccgatacgggtcgggattacctcaccgtatccggcgctgccggcgatgtgctcaatatgttgttcaaacgcatcggattggatgcgctgttcaccgcgtccgcacggcacgcggtcaccatcggctcctattcgttcgaccggtatacggacgcgtacacgggcatccggaagatgctcgccgccaacaatgcgaaactccgtcttatctgggcggatgggcgtgtgaacgcgtatgcgctgcccgtcgaacactacggcgacagcattgacagtgatctgctcgaattcaaggcctcgctcgatagccagccggtgaaccatctcatcggattgggcaccggggaactcaaagaccgtgcggtcgtccactggtacgcggatgtcaacggcaacgtgagccaaacccaatcattgaccggattggcggaacgtcaggccgtctacgactattccaacgcgaaacccgacgagctgaacaccgagaccaggaagaagctcatcgaactgcaatcacagggcggcgtcgaggtcaccataacggacaacacgttgagcatggacgttggcgacacggtcaccggccgtgacaaccggctcggcatcacgctcaccgtgcccgtggccaagaagatcgtgaaatcatccggcggcatcctgtccgtggactacgagtgcggcaccgcgtcaggcgatacgacgagtctcagcggctccgcggaatccaacggctccaccggttcgggcggctccggcgcgtactacgcggacggggtcaccatcaccatgcgcaacaacacgttcagcgcggtcgtcaccccttcgcgcgtggacgacgtggagaaaacagccaaggacgcctacacgctcgcctcgaactattcggccgaaatcggcaaggcacagcaggattccatcgccgccatcgccgcggcagccatgaacgtggcctcgataaccacggccacgccattgtccgcgagcaggaacggccaggccgtgcacatcacggcaacggaggccacggccgaaggatccgggctcatgagcgccgcggacaagcggaaactcgacggattggacacctacgcgcttccggccgccaccattgccacgttgggtggagtcagacctgacggcagcaccatcaccgtcaatgaggatggcgtcatcaccgcgcacgccacatcgaccggcaacggaatcctgttcccggtcggctacgtggtcatgaacaccaccggctcggatccggcgaatgatttcggcggcgtctgggaggaacggccctccctgggcgcgcacatgtgggaaaggacgggatgacacatgaagacactgggccgtacatgcctgctcgaggcgaacctcatcctcgtggccggcgtcaccaacacctatcgcctcagatggctgcgcagggtcaccgaaaaaaacggggtcacggtcgtcagacccatggacctgaccgggtggacgccccacatacaggtccgccgcgacgggctcaccgtcatcgacctcgccccctacacgctcctggacacggacgggaccatcaccatccgcgtcccggacgaggccacgcaaggcctgcccgcgggcgcgggcgcgtgggacctgctcctcgaagacccctcgggcgacgtgacccgcctggccgccgggcccgcgcttgtcgaaaccaccgtgagcgacaccgaaaggagtccgcattgatccgcgcattggacggctgctcgtgcgacgaggggccggtaatcatcctcgaggacgcgatcatcggcgacgtgagcatcgtctacgccaccgacgcggacatcgacaacctgttcccaacaccaaccacagataaggaggaacacgatggctaacaccagcaaggtcatcgacctggaccggctcgcccggttcaaagcaaagcaggacgcggccaacgacgccaagttcgcactcaagggcgaaggcggctcgatcgccacggccgacaaggcgggcatcgtcaagcccggcggcgatttcgacatcaccgaggacggcaccatcagcctgtacaaggcgatgggcattaactcgttcaccgtttccccatcgcaggcggaacgcggttcgacggtcgcggacgtgaccgtcgcatggagcctgtccaagacgccgaaatcgctcaccctggacgacaaggcgcaggacacggcatccaagggcacgacactctccggcgtgaacctcaaagcgagcaagacgtacacgctcaaggccaccgacgcgcgaaacgccgtcgccacccgcaccgccgacgtcgctttccgcgacaagcgccactggtgggtcgccgccagcctcgacgcggcgggagtgaccgaccagatcatcaaccaggcgaccggcgaactcgccacatggtacagcaaaacgttcaccctgaacgcggcggccgggcagcacatctactacgcgttccccgcgtcgtggggcacgccccgattcttcgtcggcggcttcgaaggcggcttcgaaggcggcttcgcgttgttgaagacgttcgaccacaagaacgcgagcggcgcgaccatcagctacgcggtctggaaatccacgaacgcgggtctcggcaacaccaccgtcgaagtgaagtaaaggagaaccctgatggcaatcgaactgatcgacacgctcgcgccgaagaacaacggcacgttccccatggtcaaagccaaggatgtggacgtcgacggcaaacgactccccgagaaactcaaggagctcgaaacggctgccggaaacatcgagaccgccaccgacgacgacatcaacaacctgttcaaccccagcagcaagtaacgaaaggaaaccatcatggccacgaaattcatcaacctgaacaacctcgccacattcctcgccaaactcaagaccctgttcgtcgccaaggaactcaagaccggcagccccaacacctacaaggtgctctccgacaacaacctcaccgacgaactcgtcaccaagatcaagaacgccggcgcctccacgttctccggcgcgtacacggacctgaccggcaagccttccatcggcggcaaggagatcgccagcggtaaccagaccgcggccagcctcggcctcgccacccccgcggacgtgaccaccgccgccaacaacgcgcgcgccgccgccgtcaacgacatcaagaatctcggctatcagaccgcagccaacgtcgagaccgccatcagcgcgaaaggctaccagaacgccgcccaggtcaacaccatcgtcaccggcaagggctaccagaccgccgcgaacgtggacgccaaggtcaacgccgcgaagaccgaactgcagaactcgctcggctccgcattccgcgccaagggatccacggcattcgccagcctgcccgcccccgcatccgccgccaagggcgatgtgtggaacatcacagaccagttcaccaccaccgaccagttcgtcgacggttcaggcaagaccctgcccgccggcaccaacgtcgtcgccgtggccgtcaccaccggcgacaccaccgtcatgaaatgggacgcgctcacaggcatgatcgacctgagcggctacatgcgcaaaaccgacatcaccccggccagcgacgccgaaatcgacgccctgttcgcctaagggaccccggccatggcggaaacatacgtcaccctccacggcctcgcacgggcggtcacgaacctgctgcaacgcaccaacacgcgcactatgttcacggccgcccaccccatcggcgagatcatcgaaaccacccccaacctcgaccccaacacaatcggcggcacatggacacgcctccccgacaccatcggacgaggccgcctctggaaacgcaccgcataaacgtcaggagaacacatgacagtcgaactcatcaccggcttcgccggcaccccacacatcggcagcgacgacatcggcgcattccaggccggcatcgtcggacctggcgactacgcgctcgccaccggtaatcagctcagggccaccatgagcaacgcgaacaccatcgccgtccaatccggtgatgccgtattgaacggccgccatgtgcacctgaccggcaccaccaccgccaccgtgcaatccggcacccaaggccagaaacgcaacgatctcgtggtgcttcgctacacgaagaacaccaccaccggcgtggaaacctgctcaatcgtggtcctcaagggcacccccaccaccggtaccccggcggatccggcccacaacaccggcagcatcctcgacggcgtcgccacccacgacatgcccctctaccgcatcccgatcaacggcatcaccgtcggtaccctcgtgccattgttcaacgttctgaagccgatgaccgacgtgtgggattccctaaccccgagcacttatattgcatgcggacgaacgaacgagggggtcagtgcccttggggcagtctccttcaaattcccgaccggccgcccctcttgggcggcgggtcgcaagcctgattccttcgtgttcagcgataatgagcaggcgaacaacaacgagattgtccagaagcgatatatgtcgcgtctttggagcctagacgcgaatggaggccagttcagaatccttcgatccgacacatggtcatggattaacgctgggaactaccctgttagctggatcgctacatggaacaaatagccttccctggatagggaaagctagttccatatcgcaacccatgagaatcttgcaggccatcttgtgccgaactctccagtacgggtgttcatcaatcgcatttgtgccgagtccacaccattctcccaaatggttatggccaagcctcgcatgtcgtccgaggaccacggcccgggggtggcgacaattacgtcaggcgccttgccgttgggagattggtaggagatgacgcaaatgccgttctcgttggaactcccaatgaacacgcctgattggacggacgtgggcagtggggttagggaaaactacgcaggcaccgggtcggcggtgcgccagacgccggcgcatcccgcgtacgcgctgttcgggttaccgagcatcgtgacggtgccattggcctcgccgtaacagatgaatgtcgtgttaccaccgaaaacggccacgggcgtattgacggaaacaggtcgatacccttcgggaatcttctcctgagccttcgtgtaattgttttcccctgactggtcgaatttcacgttgccgcccataaaacaaatattgccgatgcgcgtaagcaaaacgctgtctctgctatacggcacacgccaccccgtcgaacgctgggctagggaatcctattgcccgatcagcgcgcgttcccagatgctttgggcctccttgagagacgcgatttccggtcgcagatagaatctggcggtcgtcttgatgtcggtgtgaccgaggaacttgctgaccaccgcgatgttgactcccgcttccagggcgttggtggcccaactgtggcggagattctgcaccggcacgtagggcagcgactcctttttgcaccatgaggcgtagcgtcgcgcggcttgcgatggagtcaggtcaccgatgatacggcccttccggccgttgcggatcgccggacggcgaatcggggaaggggcagaaaccggtcggacagttcagtcttcggcggcaccaccacttcgtggccggccacccattgcactccacgctggatatgagtgatgccggaacgcatatcgatatccgcccaatcgactccgtacccctcttccggccgcaacgccagacacgagtccacaatcagccaagcctcaagcgcatggccataaaagccctgtagttggcgacgagtctgcccgatggtcagcagacgcggcacatagagcggcttgaccggcagatcaatctccaaacgggtcacatcgacctctaagtagccccacttcgcggccttgcgtagcatctgcctcaacaccgcccaagccttgcgggccgcacctggacccgcgaaccctgacagccacagctcgatgtcatccacgccgatgtcagccaactccatgctgccgaacaccggctccacatggcaccgccaagccgactcatagccaacgcgcgtgacctcgcgcaggcgctcgcaatagccgacataccggtcatcccaaaactcttgcaacaacatttcgacctccgaaaacccacacgcctcgcggccaatccgctcggtatcgcgtgtgggttttctcaccataaaggagccccgcatgtcgcagttaatcgaacaactcgttgaatggatggtgcccttcttatgcggtggcgcggtcaccgtgctgggcctcatgcggcgatggggcagagcaatcatcaacgggatgcgcgagctcctgctgtgccagttggaggacctgcgacgcgaaatggtcgtcgagcacgacggagtggcggacgaggacctcaaatcacgctcccagcgactctatgacagctatcacagcctgggcggcaacggccacggcacgtccctcaacgacgacatccaatctgcgccaatcgcgccgcgcaacagaacttgagccccgcaatcccgcgagactccaaaccaaaacatctctgaaggagaacgcatgaaaaattgggaaaccctcgaagcggacgaggacatgatcctcaacacgcacttcacacctgggcgctccggccgcaacatcgacaagattgtcatccaccacaacgccggcaatttgagtatcgccggatgctacaacgtgtggcagacccgcgaagcgtcggcgcactaccaggtagactcgaacggtcgcatcggccagctcgtctgggatgccgacaccgcatggcacgccggcgactgggccgccaacaccaccagcatcggcatcgaacacgccgacatcaacaccaacccatggcaatgctcggacgccaccatcgacaacggcgcccatttggtggccgcactgtgcaaatactacgagctcggccgcccgcagtggggcgtgaacgtgttcccccactcccgcttcagcgccaccgaatgcccggccagcctcgccggcacccagaacgcggcctacatggccaaggcgcagtactggtacgacaagatgagcggcggcaaccccagcaccccaagcacgccgagccagccgcagcagcatgccacgaacctcgaggcgttggcggacgcggtgatccgcggcgactacggcaacggcgacgaacgcaagcagcggctcggcagccagtacgacgcggtcatggcaatcgtcaacgcccgctacggcatcgcctccggtggctcctcggccagcgtgaacatcgacgacctcgcacgtcgcgtcatcaacggcgaattcggtgtcggcgacgcccgaaaagccgccctcggcagcaactacgaagccgtgcaggcgcgcgtcaaccagctcctcggccagggcggcggcggttccgcgccgagcgtggacctcaacgccctggcggatgcggtcatccgtggcgactacggcaacggcgctcaacgccaagccgcactcggagccaactacgcggctgtgcaggccatcgtcaacaagaaactcggctactaaggaaggaacaaccatgaccgacaacacgctggacacccaactcaacgagatcacggcaaccggcgcgaacacgcccggtatcgccgaccacaaggccaacggcaagctcgagccggatgacgtgatctccggcgcggaggccgaggggctcgtgctctggctcaaggcctcattggtgcgcgccgtcaagaccgccgcccagagtgcggtggccgccatcggcaccaccgtcctgaccatcggacaggtggactggcgcatcatcggcggcaccgccgcactctccgccgtcctctcgctgctgaccagcgtggccggcatccccgaagtggacgacggggccaacgtcgccaagatcgcggcaaagaactaacccccccaatccaataagcaatcggccccgtccgaccgcagacagctccatgagcttgactgcggtcggacggggccgattttttgcgttgcaaagtccttgtatataatggtgtgaccatcaaaatagagtgcacttagagtggactccttctgggaggccaagcggcagtagggttcagacaaagttgagtctattcacagcaagttttaaggaataaaaccgttgggttgtcgtgttgtacatagtggaaacactgaaccgacctgggaaggggcgatggcgatggaaacgatgacccgagtgaacgaacagatggatgtggccgccaagaagccgatggctgtgcagccgggtgtcgcccgtatgcgtgaactgactccggcccagcgccgtgcggtgatgttcgcccagcagcaggtgctcaaggcacaggccgccaagaaggccaaggatcagcgtcaagccgttcgtgaacgtatgtgggatgaggattcgccgtcgtacaagccgactgccgccgccgagcccgtggtggctgaggaggagcctcgcgagttttcgctgcgtggtgctatcggtcatgtgctgcgcgagctgcgcacgcgcgatcgccgcacgttgcgtgaagtctccgagaaggcaggcgtttcgctaggctacctttccgaagtcgaacgtggacagaaggaagccagctccgaactgctgagctccatcgccgatgcgctcggagtctccacttcgcgcatgctgcgcatggtggctgattatctcgactcggtcgagggctgatcggttggcggtgtgaagccgcgtcccgtaatctatgtctagctgtgaacccgtatcgcttgtggcgatgcgggtttttgctgtcctgcggttggtggcacactggcgtgtatgcgtgaacgggaattctgggaattacttgaagaggtgttcggtcggacctacggtcgttcgctgtcgcgtgatcaacggatgcccaaactggcgaatatgaccgtggtcgaggcgctggacgcgggggaggagccacgcgtggtctggaatgtgctctgcgaccaaatggaggttccggactccaagcgttggggccacgatcataacgcgccgcccatgcccgccgtctgacactgcgggattacggagtcgctgaatcgtgaaattggcgatttcggcgtgttgcacgccaaattcgaacaaatgttcgtgtgtgtggttatagttatccacagtgacaagaagccgcatacgtgtgcacagggtgcttgccatctgccataatccttaccgcagtagggtttaaggaggccaggtggccaagctcgggcaagctggaaccacaatggttggtttggattgcctcacatggcatgtccgtcatacggtggaggcatccgattcgcacacgacttcgacaaggagaagatcatggcacttgagaccaagccggccaaggacccggcagccgaggacaagcacgagctcgatcccaagcgcaaggcggcgctggacaccgcgctggcgcaggtcgagaagagttttggcaaaggttccgcaatgcgactgggcgaccagcccgagcagaacgtcgaggtgattcccaccggttcgttggctctcgatatggcgctcggcatcggcggcctacccaagggccgcatcgtggagatctacggccccgaatcatccggtaagaccacgctcgcattgcatgtggtggccaatgcccagaagaagggcggcgtggcggcctacatcgatgccgaacacgcactcgacccggcctacgcccgcaagctcggcgtggacaccgactcactcatcgtctcccagccggataacggcgagcaggccctcgaaatcgccgacatgctgattcgctccggtgcacttgacgtcatcgtcatcgactcggtcgccgccctagtgccgaaggccgaaatcgaaggcgaaatgggagacagccatgttggtttgcaggcccgactcatgagtcaggcgctgcgcaagatgaccggcgcgttggctcaggccggcaccaccgccatcttcatcaaccagctgcgtgaaaagatcggcgtgttcttcggcaatcccgaaaccaccaccggcggcaaggccctgaagttctatgcctccgtgcgtctcgacattcgtcgtattcaaaccctgaagaatggcgacgaagcggtgggcaaccgcacgcgcgtcaaggtggtcaagaacaagatggccccgcctttcaagtccgccgaattcgacatgctctacggtgaaggcatttcccgtgagggctcggtaatcgacatggctcagcaggttggcgtggtcaagaagtccggttcgtggttcacctatgagggtgatcagctcggtcagggacgcgagaaggttcgtcagttccttaaggacaacccggccatcaccgaggagattgagaataaggtcaaggccgagttcggtctgatcggttccgccgaccagttcgcggaagatggcgaagccgcagcagcggccgctgtcagcgaggccgccgctgccgacgtggccaaggacagcaaggccgcagcggcgcctgctgccaaaacgacccgtgccaaggccggcgcagctaaggcctgaacatgattagtgccgaagcattcttgcggcgcaatcctgttgcgtcgcaagacatgcccattgccgagcagcgtgttcagtcgaaaccgccgggacgtttttctcgacgggggagagacgctgccgttgtcgaagatcccaatgatttggacgcttgccgcgaggctgcattgcgtttgctggacgcggccccacgtgcatccggcgcgttgcgcgaacgattgctcagcaaaggctatggcgaggcgattgtggacgaggtcatcgaacggctgattcgcgtgcaactgattgacgaccgcgcttatgccgaatcggccgtacgctattgtgccggtcgcatgatgggtcgtcgtggtgcggtcctggaacttgctcgcaaaggcgtggaccgcaaactggctgaacaggtgtgtggcgaagctgagcaaaatggcatctttgaagatgccgcatgggaattgggccgccaaatagcccgcaaaacccatggcctcgatcgtcgggtccgtcagcgtcggttttggtccgcaggcggccgcaaaggacacagccccgaaaccctccgccgagtcgccgccgaattgttggtgtagccaagaaaaaaaatgagacctcttataccccgggttctgtcgtgccgtgcgcgaacgcacggcacggatggccatccatctcgacctgacgttgccgccaggctctagcagcctacccgatgacacgggcgagcagcccttaccgccatctgcttggccttgctcccgatgaggcttgccatgcgacctactgttaccagaggcccggtggtctcttacaccgccgtttcacccttacccgtcgaggacgggcggtctgttctctgttgcgctatctctcaggtcaccctgggcggacgttatccgccatcgtgctctatggagcccggaagttcctcagccgatcccaatgaagatcacggccgcggccatcaagaggtctcaagcctgcaattatacataaggtgcggaaaaggcggcatcccgccctgcggtgaggccatgacgttgcccggttatcctgttttctccatagttgggcatagttgggcgattcgtgaacgacgcgccgaatatcggatggggcgtgtcgggcgtgttgtggcgtgtcgtatggagacgaatcaaatctgtaagagcttggtatgtgcgagaaagagcaagaaaacgctgcctatccattgcagtatttaccatgacgaacaaacgagccagcctgataaaccggtatcaaatcttcttataggagactgctgccaaaaccccagtatatacatcgtttcattgcagagaaaagcccgggaataaacatatattctctgggcgagtttccggccgttcacccattgttcgtctacaatgaaacatacccggtcggtgatgatgccgttcggaacacatatagcgggttacaccgcttgagttagaggaggtcaacatggaaatcgtcgttaccggacgccacacgcaggtcaagcaaaggttccgtgatgtggtcgagaccaagatgaatcgtgtgaccgctatcgccccggatgctcagcgcgcgcagatcgtgctgacccatgagggcaacccgcgtcaggccgataccgccaagcgcgtggaaatcaccgttatcgccggacgtaccgtggtgcgtgcggaggcttccagcaccgatgaattcagcgcgctggacatggcgctggataagttgacgctgcgtctgcgtcgtactcgtgaccgtcgcaaggatcaccgtcgtggttacgcgaacccggtcccggtggatctgggtgttatcgccccggagcccgagccggaggtgtcggaggaagagccgaacaacagcccgcaggctgcggtcgcctccgatcttggccctggcgaatccgtggaggtccaggttggggatacgccgattgtcatccgtcgcaagctgcacatcgccgagcctatgagcatcgacgaggcgctgtacgagatggaactgatcggacacgacttcttcctgttcgtgaacaaggagaccggacgcccgtccgtcgtctaccaccgtcacggttggagctacggcgtgttcgaaatcgacactccggagaatgtcaagaaagcctgaaggtaaggcctgctgacacgatcagctgataccgcatggaccgcttccaatatggaggcggtccattttttcgtaaaaaggtcgaaaaattcgactgctgacggtgtgaggcgctatcctgatacgcggacaccaccacttatcagtcaagggagaacccagtggtcgatattattgacaaagccctgcgaatgggtgaaggccaccagctcaagaagctggagaacgtggccaaggccgtgaacgctcttgaggacgagatctccgccctctctgacgaggatctgaaggcccaaaccccgaagttcaagcaggaaatcgaaaacggcaagagcctggacgagatcatgcccgaggcgttcgccaccgtgcgcgaggtctccaagcgcacccttggccagcgtcacttcgacgtgcagctcatgggcggtgctgccctgcactggggcaacatcgccgaaatgaagaccggtgaaggcaagaccctggtcgccaccctgcccacctatctgaacgctctcgaaggcaagggcgtgcacgtggtcaccgtcaacgactacctcgccagctaccagagcgagctgatgggccgtatctaccgtttcctcggcatgaacgtcggctgcatcatcaccgagcagaagccgccggagcgccgcaagcagtacaacgctgacatcacctacggcaccaacaacgagttcggcttcgactacctgcgtgacaacatggcatgggagaaggccgacctcgtgcagcgcggtcaccactacgccatcgtcgatgaggtcgattccatcctcatcgatgaggcccgtaccccgcttatcatctccggcccggccgaaggcgacgtgacccgctggtaccgtcagttcgccaagctggtgctgaagctcacccgcgacgaggactacgacgtcgacgagaagaagaaggtcgtcggcatcctggacccgggcatcaccaaggtcgaggacttcctcggcatcgacaacctgtatgagccggccaacaccgccctgatcggctacctcaacaacgccatcaaggccaaggaactgttcctgcgtgacaaggactacgtcgtcacccagggcgaggtgctcatcgtcgacgagcacaccggccgtatcctgccgggccgccgctacaacgagggtctgcaccaggccatcgaggccaaggaaggcgtggaggtcaaggccgagaaccagaccttcgccaccatcaccctgcagaactacttccgtatgtacgacaagctcgcgggcatgaccggtacggccgaaaccgaggccgccgagttcatgaacacctacaagctgggcgtgctgccgatcaagaccaacaagccgatgatccgcaaggaccaggacgacctcatctaccgcaccaagaaggagaagctggccgccatcgtcaaggacgtggccaagcgtcacgccaagggccagccggtgctgctcggtaccgcttccgtggaaagctccgaagtggtctccaccctgctcgacgtggccaagatccctcaccaggtcctgaacgccaagcagcatgagaaggaagccgccgtggtcgccgtcgccggccgcaagggagccgtcaccgtggccaccaacatggccggccgtggtaccgacatcatgctcggcggtaacgtcgagttccttgccgacgccaagctgaagtccgagggctactctccggaggacaccccggaagagtatgagaagcgttggccgggcaccctgaacgagatcaaggcccaggtcaaggacgagcatgaggaggtcaaggagctgggcggcctgtacgtgctcggcaccgagcgccacgagtcccgtcgaatcgacaaccagctgcgcggtcgttccggccgtcagggcgatccaggcgagtcccgcttctacctgtcgctggaagacgatctgatgcgtctgttcaacacccagctggtggcccaggtcatggccaagggcatggaggaaggccagccgatcgaggccaagtccgtgaccaagggcgtgcgcaccgcacagaaggccgtcgaatcccgcaactacgagattcgtaagaacgtgctgaagtacgacgacgtgatgaacaagcagcgtaccgtcatctactccgagcgtcaggccgtgctcaagggcgaagacatccacaaggacatcctgcgtttcatttccgacaccgtcgagtcctacatcaagggtgccaacaagggatccgagaaaccgaaggactgggattgggagggcctgttcaaggcgctcaacaccgtgatccccaccaaggtcgacgaagacgaggtcaggaagatcgtcggcggcctcaagggtgcgaaggccgtcgaggccgtgcgcgacctgatcgtcgaggacgccaggcagcagtacggcgaaatggaggagaccatcggcgagaccggcttgcgtgatctcgaacgccgcgtggtgctcgccgtgctcgaccgcaagtggcgcgagcacctttacgagatggattacctcaaggacggcatcggcctgcgtggcatgggccagcgcgacccgctggtcgaataccagcgcgaaggctaccagatgtacaactccatgatcgaggccattaaggaggagaccgtccagctgctgttccacatcgacatcaagcaggtcgccaccaccgacgaggccgttgacgaggtcgaggagaccgccgaaagcgccgacaccatcgccgtggcctccggccccgacgagaacggcgaatccgtggtcgaggccgccgagggcgaagtcgaggaagaggacgaggatacggacgccaagcaggcgatcgccgaatccgcagccgcctccggggccggcgagtccacgctgcctgttgccggaccggctccgatcagccacgccgaaggcaaggtcccggtttccaagcgtccgaagagcgaagagctcaagacgccgtgggccgacggccgcaccttccctggcactggcaagaacgccccgtgcccgtgcggttccggccgcaagtacaagatgtgccacggccagaacgagaagtgacgcatcgctagttagtaactagctcatggctccccacacggggagccattttctatgcggttcatcagcatgtattcgtgcggtgccgtacgcgcgggacggcacgcgattttcgcggattttgacgtcgtatcccacactgttgcgggatggcacgagtgtcaatcgattgactagcgtggcgtcccgcagtacgaattacggaatcgttgaaattccgccattctcggtgttatggtgtcacggtccgcaaagggtgatgtgggacggcacggctcaaacggcgaaaatgagctgccgtcccgcagttttacgggatagcacaaaaaagaggcttctgctgttttcgtgggttgtcgggcgcgtcgctcgtccaactgacgatgtggaacccgtcgggcgcgcgttcggcgttcgggcaccactcatgcacgcatgagtcgatccaccgggccccgtccccggcgacgaccctgatggaggcgcgctgttcgggcgtcaacgtttggaagaacaggccgaacacgtccctgccgtacccgtcgtgcgcctatatcgcccgatgccgttcgtggtcgacgaccacggtgatgcacgtgtggcctttgcggtagccggtctcgtccacgccgatcgacgtgaggccgccgaacggagacggcatcgacgctttcaaccgttcggcgaccctatgggcggcgtcttccggcggcgcgccacgcgacgtgcggaaaaccgcttacggtcttctggttcgcgacgctcatcggccacgcgcgttccgattcgaaatcgcgtgtggaccggctgcccggctcggcccacggcacggaagcgaccacgacgccgcacgccgccgccctggtcatgcccgcggcgcctccttccgcatcgggagcatcggagcatacccgcacgtggacgcacccggatctcgagcacgggttcggaacgcggcggcgaatccgtgatccgcgcatcctctgcaaccgtgcctttgacgttcggcaatccggtgaatgggcttttgcccaggcgttcttcgtgattcatttctttggtcggaaaacagaatacgcgggaacgcccctcacgcttacgaaaccaacggctcgacgacgaaccgacatccacgaaaacagcaatagcgccatattttgcaatatggaagattcagggccttgaaatgacgaaccattacaatgagcggcgaacatacatcacacggcgtaggaaacgccaaggagggcatcatggccgagatcacatggaagtcgattctcaccaagctggtcgggggagaccaccttactgctgaggaatcggagtggttcgtggacgacctgatgcaaggtaacgccaatccggccgccgtgggtgccgcgctcgctatgcagcagcagctgggactgaccgccgacgaggtgcgtggtgccgccaaggccatggtctcccacgccgtgccgctgaacgtttccggtgggaccaccgacatcgtgggcaccggtggtgacggcttcgccaccgtgaacctgtccaccatgggctccgtggccgccgctgcagccggcgtgaagatcgtcaagcacggcaaccgcgctgcatcctcgaagtgcggtgccgccgatgtgctcgaagacctcggcctgccgctggatttgaagccggaggccgtcggcgaagtgggcgacgaggtgggcatcaccttcgcgttcgcccgcaccttccacccggccatgcgcttcgtgggcccgattcgtgccgcgctcggcattccgtgcgtcttcaacatcctgggaccgttgaccaaccccgccaacccggcacacgtggccatcggctgcgccaaccgcaaggtgagcccgatcatggctgccgtctacgccagccgtggtcagtccggcttggtctacacttcgcatgagggcatggatgagctcgcccccaccggcccggtttccgtctgggagattcgcgacggcaaggtcaccgaaaccgagttcgacccgaccgtggatctgggtctcgccaagattaccgtcgaccagctcaagggcggcgtgccggacgtcaacgccaacgcatttaaggacttcctggccggcaaggacattacgtcccgcaccaccgcgctgctcaacgctgcctccgccatcgtggctgacggcaatctggtcggcaacggcacactggccgagcgcttcgccgaggcctacaagctggccgaggatgctgtcgactccggcaaggctgaagccctgttcaacaagtggatcgaaaccgccaagtccaaggcgtgatatggaatgggtttgctcgaatatatttacctttccttcattatcaactatttcgagttgcaggagtccatcgacttcaattcgtgacctatcttggctcggccgcaattacggacgagctacgcctgtgatacattggttcgctatcgctcacacctcgcctacaaacagcccactgggctgtttgcttaacggctcggcctcagagaggggagccaaggactacacaacctacgcgaactacaccctcgcgccgtcgtcgtaatagccaccctgatcaccggggcggtctttgcggttgaggattttggccaccaatccgcccagacccaaaatgacgcccagcccgaagagaatattgagcagcgcgcctaagagaggaatcgcgttcaagccgggaacgaatatcatcaccgtttcgcctgcgagaccgatgatgagcaacgccgtcagcagtaccgtagatgctttgaccggaccaagatcagggttcgggggagtgaagccgccatcatcataggcgtccatcacattatcggtatccagccagctggagccggtgaaatcacgggggcctggctgcttgccttttttgccgccacggctcgggcgagcatcatcggtgaacgagccgatatccaagtcatctatggaaagcagtgcttccttctcgcgtttcttggcctgcttctcgaactttttggcctgcctggaggaagccacgtcatgcaagtcggcctgatgctcggcttcgaacgcggcccacgccgcatccaaatcgttcatgtcatgcgattgcggtgtatcggcaccattcgtggccggtccggcggcaccgggagtcgacgacttggacgaagtatcggaatcctgtccgttgcccggcgtgggggttggccgctctccgtcggcattgctattctggttctcagtcataactgtcactctaatcaggcgaccggccaatggctagttcgtctgcgggaggaatgccaagtgctctactggttcttcgtcaaaggtctcggccctattgctcatcatcgtttgagccctgctgtcagcggactgaataacgtgcctcgagagggtggcgcgattatcgcagccaaccatctggcggtgattgacgatgctttgattccgattacctgcccgcgcatggtgcacttcatgggcaaagccgaatacttcgagggcaagggattgaagggcaagttcaagaagtggtggttcacgtccgtgggcgtgttcccggttgatcgttccggtggcagcaagtcgcttggcgcactcaagcacgcacgcgagattatcgaggatgggcacctgttcggtatccacattgaaggcacgcgcagcccagacggtcgactgtacaagggacacaccggtgccgcacgacttgcgctcgagaccggttgcccgattgttccgaccgccatcatcggctcggacaagctgcagccgattggcacgtcgattcccaagaagggcaagaccaaggtgttgtatggcaagccgattgaggttgcgaagaagccggctgatgaaattacacatgatgatttgcgttcgctgaccgatcgtgtttccaccgcaatccagaaaatgagcggtcaggaattcgtgaacgaatacgcccagaaggtcaaggccgagctcaaggcccagcaggccgctgaagaagccgaaaagtaattaacaaatgaggctccctcgtctgaagacagagggagcctcattcaaatctcacacgatggtgagggtgatgacggtggggttgccgttggcgtcgcgcaagcgaatcttgccgccgttggagaggtccgtatcgccgcttttcacggtacgtaccgtgccgaacaggccaccgagcaccttgtcggttttcacctcgaacccgagaccttcaagtgtcttggttacggcgctttcctgtttgccgacaaggccggacggtatcgtcgccatctccggacccttggaaatcaccacgtccacgctatcgccccacttcagctgggctccggcttcctgagacgcggaaatgacttgaccggcctcgaccttgtcatcgtactgttcggtgacattggccgtgagcttcaactcgccgagcgcggcttgcatctcatcctgggtcttaccgacgatgttaggcatggtcaccggcatcggtcccttgctcaaagtaaccgtcacctcatcgttgtgcttggccgtggtaccgggatcaggggagatcgtcaatgccacaccctgcggcgtgtccatcgaatactcatccttcgactcgtcatgcttgacattatcgaagccggccttcttgagcgcgttcaacgggtccttgccattggccgaattcgcgtcgagaatatccttcgggatggtggtcatccgcacgcccttggacaccaccaccgtaagctcctgattggctcgcttgcttatgcggctgttcacaacggccttggtcttgttcacggaagaagagatgatcttgccttccgccacgtcgtcgctgtattccttgtgcgtcttgtaggggatgccgagagccttcaacgtgctctcatacgtggcccaatccgcgccggccaacgagcattcggtgcttgcattcgcatcgcaggtcacgtcatccggcttgggcacactccaatagctgcccggtccggcaaaccaccaccagccggcggttccgccgattgcagccagtaccagcacgatcaccagtacgatgatgagcggttttttgctgcgctgcttctttggcccggtgccgttggaagcgacgtccggctcatcggaaaaggcaagcgctcgggtgaaggcatcgccggcctgaggcagcacttgtgtctcgctgccggactgtgccatgatttgcgtcttatggggagccgaagcatcggctggcgtcgacgaatcaagtgccgtggtgggggcgaccggaggagccggaggattgacgtctgcggcgccaccggtatcgacggtattgcttgcgacatcatcggccaaaaacgctggtacggacggcttgaacgttgctgcaccggcaggtacgccggtcagcggggcctgctcggcgatattgcctaccagcgctgcagcggtggcatcggtatgatcacctccgatgggttcggcatgcaaacggtattgccacgcctccagcggcaatttggcggccaactggctcaattcctcagctgctgccgcgccatcggtggggcgggcatccacctgacgcgcggtcagatgggcgatgaacgccgccacggacggatcaatgccctgacagaccgtggccacggacggcacgtcctcatgaacatgcttgaaaacaagcgtcaccggattatccgaatcgaacggcaccttgccggtcagcatctcccatgccatgatgcccaccgaatacaggtcgccttgcgcggtggcctgattgttctcgatcatttcgggagccagataagcggcggtgcccaatagcatgccggtggagctcaatgtggcctggctggcggccttggccagaccgaaatcagtgatctgcacatggccgcgatcattgatcaaaatgttctcgggcttgatgtcacggtgaaccacgccggcgcgatgtgcggaagccagaccatccagcgtctccgcgaccacgcgcagcgtctcacgtacggagaatgtgccttgggcgttcatctcatgccgcagattgacgccatgcacatattccatgaccagaaaatcaagtccattgaactcgccggtgtcatacacctgaacgatgtgcgggttggcgatggacgcggccgaattggcctcgcggcggaaccgttcgacgaactgctcccgatgcgggcctttggcgagttgtgtgtgcatgaccttaatcgccacggtgcgccccagacgctcatcgatggcctcatacacggtggccataccaccctcggcgatattgcgcacgatgcggtagcgtccctcaatcatctgtgcgggctcgttctcactcatgttgtatcgtacggttcctttaatcacgactaaacatgttcagtgtacatggccccggttacgcggccggagcatcagcgcatagctttcacgggttttcaccggtgttcatggtctcatggtccggcggctcgcattgtggactatcgcaaggattcggggacgaatcgcgcacaagcctcggtcagacggcgttgcgcttcggaattcagctcaagaccggcaatcgccttacgggactcaccccatagggcagcgatgcgctcgcgggatcgatcaagagcaccggtcgacgtgaacagttcaatggtgcgggccacctggttgtcattgcgacaatcttcttcgaagatggcaatcagatcggccttatccgccgtatctgccgcagacagagcatcagccaacagcactgtgcgtttgccttctcggatgtctccgccaactggttttccggtattgcggcttgatccgacgacatccaacaggtcatccgccagttggaacgccagtccgagcggccggccgacggccaacgcgcaatgcctggcctgatccgggctctctcctgcggccagcagtgcaagcagcagtggagcgatggtggtgtaactggctgtcttccagcggaatacgttcaatgaggcgttcgccagagcttcgggattggacagtggggtcatctcgacggccaagtccagtacctggccgatttccacctcgcgttgcatggtaagaaacgcctcgttcagggcatcggtgttgggaagacggctggcggaccggcgtgtgatttcaatgcaggcggtggccagaatgtcgccgagcatcaggcccaagccacggcctatggcaccgctgtgtacggcctgttccaaggcacgatgtgcggaaggcctgccccggcgcagatcggattcgtcgatgatgtcgtcatgcaccagtgcggccgtctgaaacacttcaatggcgcaggccaggtcgatcatggcgtcacgccgatcaggcgtcacgtcgccggcaagaatatcgaaggcgtccaacgcgagcagcgcacgcagtcgtttgcctccttggctggaggaggcggcttggtccacaacctgttccatcaccggtttcagggcgtcggcaacctcgtcggtggcgggggcggcagtcagttcccgcaccaactgaatgatgcgtggctcgatgatttcgcggttgttagcagttgtgcacatgcctaataacttatccacagggtttgaagaacacaagaacgttgggaatcaagggttttgaagctagaaccacaatggtcgttttttcctgcgtcatacggcgttttcagccatagtgggcacacaccccctcggcgcatgagctatccggctcggcgcgcaccacaacaccaatagattgcacaccattagtcaaggaggacatgatgaacaacaacacgccgcacaagccgcgtaagagccgacacgccaaacggcacgccgccgagcagacggagccctttggctttgacgagttggagacgagatcacaggaatttcgcaatgatcgacgacttcgaggcgcgcaacaggctaatgccgactgggtggccgaaccattggacgaatggctgtcttgtcttgatgccgggaacaccgacctaggccgagagacgatggccgcgtttgcggtgggcatgcgtgagaccttatcgattcgtgatgcgctgattctctcgttggttattgatgaaagccgttgccccaagtcatggcttatggaattcgcggcgcgaccgcatctggcgcgtacgagaacacgaatgggcgagctgctgacttgcgcattcgaggatgaaggcatgatgccggataaggagcgttgccatgccggcatcggtatgttgctcgatatcgccgaagcctcaccggtgccgtactgcatacagccattggccgtaatcgcctacaccttatggtggctgggcgatccgcgagcaatggtgttcgccttgcgatgcctgctgctcgatgaggattgttcgctggcggcgatgatattctcagccgccgatcgaggcgtggcaccggcatggtgctcgggctgagtgaacagaaacggcggatttccgaggttttacgcgcgatgcgcggaaggaaagcgtgtggtgatcggcaacacgtcgggcaacgatgtgggaataatcgtccgtggagggtggtttactcacatagttgacgatttgcccttgccagaagtgggcccatgtggtatatgcacttcacggcgagagatcaggaggagcagttttggccacgaaggaaacgacggcaaccaagcagacagccgagtccagcgaggagaccgagaccaagaagaaggccagctctacgaccaccgcacgcaagacttccgccaagaagtccaagtccgcagagccctcgaaaaagaccacgcgcaagtccgctgcgaagaaaaccgcgaagaaggccaaggacgatgagctcgtcaaagacgaggacactcaggtcgatgacgagcttgatgacgatgccgaggtcaacgacgacgatttggacgttgacgacctcgacgaggatcttgacgacgttgacgaagacgatgccgacgacgaagacctcgatgaggacgatgccgacgacgatgatgtggaagacgacgaggacgaggaagaagccaagtccaaggcacccgagcagcccaaggaaaagggtgcctacgtggtctccgacacggatgatgaggaagagaacatcatcccttcgggcaatccgaagcgtcgtgtgatcgcggccggcgcaaccgccgacccggtcaaggactacctgaagcagatcggccgtgtgagcctgctgaacgccgaacaggaagttgacctgtccgagcgcatcgaggccggcctgtacgcccagcacctgctcgacaccgaaagtgaaggcatggagttcaagcgcaagcgtgaactcaagtgggccgctgccgacggcaagaaggctaaggaccatctgctggaagccaacctgcgacttgtggtctcgctcgccaagcgttacacgggtcgtggcatgctcttccttgatttgatccaggaaggcaaccttggtctgattcgtgccgtcgagaagttcgattggaagaagggcttcaagttctccacctacgccacgtggtggattcgtcaggccatcacccgtgccatggctgatcaggcccgcaccattcgcgtgcctgtgcacatggttgaagtgattaacaagctgtcccgtgtacagcgccagatgctgcaggatctggggcgtgaacctacgccggacgagctggcccgcgagctggacatgccggttgagaaggtgcaggaagtgcagaagtacggccgcgaaccgatttccctgcacaccccgcttggcgaggatggcgattccgagttcggcgacctcattgaggataccgacgccatcgctccgtccgacgccgtggccttctccctgctgcaggaacagttcaagcaggtgctggaaaccctgtctccgcgtgaggccggcgtcatcaagatgcgctatggccttgaagacggccagccgaagacgctggacgacatcggccgtgtgtatggcgtgacccgtgaacgcatccgtcagatcgagtccaagaccatgtccaagctgcgccacccgtcccgttcgcagaccctgcgcgacttcctggatcaatgatcatctggctcccctctgtgaggggagccaagcatttgaagagaaaaataggactgtatgcccaaagaagaatacggcgccaaggacctagctgttcttgagggcttggatgcggtgcgcaagcgtccgggcatgtacatcggcaccaccgactcgcagggtcttatgcactgcctgtgggagatcatcgataactccgtggatgaggccttggccggcttctgcaacgatatcgtggtcaccctgcacaccgacggttccgtggaagtcgcggacaatggccgaggcattccggtggataaggaaccgaaaaccggcctgtccggcgtggaggtcgtactgaccaaactgcatgccggtgccaagttcggcaactcgtcttataacgccgtcggtggcctgcacggcgtgggctcctccgtggtcaatgccctgagctcccgactggacgtcgaagtggatcgtgacggcaagacgcaccacatgaccttccaccaaggtcaccctggcgtatacacggatgccgacccggccaatccgtctcccgattccccgttcaagcgcactcgcaagaaccgacccaccgagctggaaatcatcggcaaggtatctcccaaaaccactggtacccgtattcgctactggtatgatccggagattttcaacaaaaccgccgaattctcatacgaacagctcatcgaccgcgtgcgccagaccagcttcctggtgcccggcctcaaaatcaccatcatcgacgaaaacgtaccggaaacggcggcgactgacaccgtcgaggccactgatgacgcaacagtcgaacctgcgcaagaccaggcaccggccttggatgtctcgtccgacgatgccgagagcccggccgaggaggacttctcgctgacggccggcgaccaggtcgtcgatggcgcgttcggcgaacagcccgcgcacccgcgcgtcgtggaattcctgcacacaggcggcgtcaaggacttcgtcgacttcctgtccaaaggcgagccgatctccgacatctggcgcatccaaggcgagggcacctataaggaggagacccaggccgtgggtgagggcggcgaactgcacgcccaggaaatcgaacgcacctgcggcgtggacatcgccctgcgatgggtcaacggctatgacaccacaatcatgagcttcgtgaacatcgtggagacgcccggcggcggtactcacgtggacggtttcatgaacgccatcaccaagcagattcgcaaggcggtggaagacaacgcccgcaagctcaaggtgaacatgaaggactccgccatgaaggtggagcgcgacgatatccaagccggactcgtggccgtggtcaccgcacgcgtggccgaacctcagttccaaggccagaccaaggatgtgctcggcaccgcgcaggtcaagccgatcgtcacccggctcaccgacaagcaattcggcgagatgatcaccggctccaagcgcgggtacaaggaacaatccggccgcgtgctggagaagatcgtcggcgaaatgcacgcacgcatccagtcgcgcaaggccaaggaggtcacgcgccgcaagaacgcgctcgaatccgcctcgatgccggccaaactctccgactgccagccgggcaatgacgacgtggccgaactgttcatcgtcgagggtgattccgcactcggtaccgccaaggccgcccgcaacgccggtttccaagcgctgctgccgattcgaggcaagattctgaacgtgcagaaggcgtcgattacgcagatgctctccaacaaggaatgcgcggccatcatccaggtggtgggcgccggctccggccagagctttgacatcgaacagtcgcgctaccacaagatcatcatgatgaccgatgccgatgtggacggcgcgcacatccgtatcctgttgctgacgctgttctaccggtacatgcggccgcttatcgaacacggctacgtgtatgccgcagtaccgccgctgcaccgcatcgcgttgaccggctcgcacaagggcgaatacatctacacgtattccgatgacgagctggccggcaaactggccgacctcgacaagaagcacatcggttacaacgacgacatccagcgatacaagggtctgggcgagatggatgccgaccagctggcggacaccaccatggacccgcgcacgcgtatgctgcgccgcatccgcatggaggacgccgcccaggcatccgagatcttcagcctgctgatgggcgacgacgtgccgccgcgcaagcagttcatcgtcgacaacgccgacgatttcgaccgctccaagatcgatacctgatcgaagacgtcgctgataatgacatcgtgcttaccgagaatttccgtaattggcgtttgaggtgagcacgttgtcatatgttttatgcgtgttgcccatgagtcattcgatagactgatgacatcgttatcacaaccggtgccgtactgtgaatgggagatgggacatggccagtctgttgcttgccgtcatctatgtggcgtttatcagtctgggattgccggattcgctactcggatccgcatggcccaccatgagccaggatctgaacgtgccggtggcgtgggccggcggcatctccgcggtgatttccatgttcacgatcgtctcggcactgctttcggaccgaatgacattgaaattcggggcaggcaaggtcaccgccgtttcggtggcgttgactgcggcggccttggccggtttctccgttacctcgaattactgggtgctgttggccatcgccataccatacggccttggcgcgggcggagtggatgcggcgctcaataactacgtagccattcactacgaaagccggcatatgagctggctgcactgcatgtggggcgtcggcgcatcggtcggcccctacatcatgggctatgcgctctctcaaggccaaggctggccgtggggctatcggtacatcgcgatcctgcaggtgatgctgaccgtcatcctggtgctgagcctgccgctgtggaagaaacgtggcgcaattgcggtcggcgaatcgaccgatgacaccgcatcatctgacggcaatgccgagagatttggcactgctgaaggggtgtctgttgccgaacgcaaaccgctcggcgtggccggcgtgctcgccattcgcggtgccaaggaaatcctcgtgatgttcttctgctactgcgccgtcgaatctacggcgggcctgtgggcctccagctatatggtgatgcacagcggcatcgacaagatcaccgccgccagctgggccagcctattctacgtaggcatcaccgtgggccgtgcgctttccggcttcctgaccatgcgattcaaggacccggtcatgattcgcctcggccaagtgctggtgttcgccggcatcctcaccatgttcgtgccattgcctcaccaccttggcgtggtcgttgggctggtggtcatcggcttcgggtgcgcgccgatttatccgtgcgtcatccactcgacgccggcctacttcggcgaagacaaatcgcaggccatcgtcggcgtgcagatggcctgcgcctatgtgggctcactgctcatgccgccactgttcggcatcatcgcgcaatatgcgacaatcagtctctacccgtggtatttgctggtgctcttggtgctgatggtggccatgcacgagcgtcttcgcaagttgcgcggctgatcatatgcgcatctgggcccgccgcctactatgcttggagcccatggtgataagtgaagaagaacatgaacagatgcccgagcccgtacgggaacgattggaagcgctgaaggatgcgccgggctcggtaatcgtggtcggctcgatgaacgccgattacaccgtaaccaccaaacgactacccaagccaggtgaaaccgtcaatggtggtgccatgaaagtgctgccgggcggcaagggcgcgaatcaggcgtctgccgccgcgcgcctcggtgtcaatgtccagttgctgggcgcggtgggcgaggactccaacgcggacttcctattaagcaagctggatgaggccggcgtcgacaccgccgatatcctgcatgtcgaaggccccagcggcaccacggtaatcaccgtgagcgctgagggcgagaacaccatcgtctattcgccgggttccaatgccaaggcaagtgccggctatgtgcaatcacatcgcacgaccatcgccgaatgcgcggtattgggactgtgtttggagagcccgattgccaccgttatcgccgccgcgcagaccgcgcatgacgctggcgtgaccgtgctgctcaacgactcgccatttatggacgagctgcctcacgaactggtggaagccacggatattctgctggtcaaccagcatgaagtggctcaactgctgggcctgccggatgatgacgtggaatcactcgactggtatgaggtcgccgaacgattcaccgattacggattcgaccgggcgatagtgacgcttggtgcgtcgggatcggtggtgatcgagaacggacgttggcatcgcgtatccgccgcgcaagtcaatgcagtggacaccaccggttgcggcgactcgttcatggggaccgtgctggctggcttggccgccggtcatacgctgctgcaatccgcgcaaatcggctcctacgtctccgcctatgcggccaccaagcttggtgcccaaagtgcctacggtaccgccgaagaagtcatcgcctacttcagctgacctataatcgtacatatgtgcgaaagcctgagcctgttttccgaacccaccaagatgtggttcgagcatgccttcggtcagccgaccgaggcacaggctcaggcatggccggcaatccattccggtcgcaatgtcttggtcatcgcccctaccggttccggtaaaacattggccgcgtttctctcagccatcgaccgattgatgaccgtgccacgcacgcggcgtgccggtgtgcgtgtgctgtatatctcgccgttaaaggcgctcgcggccgatgtggccaagaacctagaacagcctttggagggcattgctgcacaatgcgaggcgcaagggctgcccgtgccgaagatcgcggtcgccactcgttcaggcgacaccaccgcacaggagcggcgacgcatagcctcccatccaccggatatcctcgttaccacgccagaatcgttgtatttgttgctcacttcgaaggcagggcggattctcggcactgtcgatacggtgatcgtcgatgagattcatgcagtggcgggcaccaagcgcggcgcacatttggcggtaagtctggaacggctggagaaccttgtcacagaatcgcgcaagcgagatgcaatcgatgcagatgctgatgagggcggtgatgccgccgtcgatgctggccgtggcgatcgtcatatgcagcgcattggtctatccgctacggtgaatccgcctgaaaaggcggcgcgattcctgggcggcgggcaaccggttaccatcgtgaatcccggtgggcggcctgcaatggatttgcgcatgattgagccgttggaaaacatgcgtgatttgcagtccgtgaatgccaagcagcgtgtcggtggcgtggatgctgaacggtccgctccgcatatcagtggtgtcacgccggccatgcagcgacttgctgaacgcaggggcattgtgccggtggatgatagagatgtttcttccacttctggggacgattctgatgcgagtgatgcgttcgattcctccgcgttggttggagcggcgggcgaccgtacctccggttccatttggcccgtggtggaacgcagtattttggatgagattctcgcgcaccgcactacattggtgttcgttaattcgcgtggtgtggctgagaaactcactgcgcgcttgaacgatctgtatgcgcagacccggcatggcaccaatcccgacactgtgcgggatctgggctctccggaaggccgcgaagggttctccacgcattacgatgctgtggtcggctccaccaccatgcttgtcggctcacatgagggcgatgatgtcatcgccatggctcatcatgggtcggtttccaaagaccgtcgcaaaatgattgaggaacggcttaaacgtggtgaattgcgttgcgtggtggccacctccagtttggagctcggcattgatatgggctcggtcgacttggtgattcaagtcgatacgccgttgtcggtctcctccggattgcagcgtgtaggccgtgccgatcatcaggtcggtggcgtctctcacgcattgttctacccgctcacccgtcagcagattgtcactggggccgcaagtctggaagccatgattgccggcgatatagaaccattggccgtgccgcgcaatccgctcgatattcttgcccagcagaccgtggccgctgccgcgatgcacgatttgaacgctgatgactggtatgccacagtgcgtcgtgctgcgccgtttgccgaactgccacgtgacatgttcgatgtggtaatcggcatgatgtccggcgaatacaacagcgaggaattctcggccttccggccgcgactggtatggaatcgggataatggcctgatttccgcccgtcccggttcgcagaaagtggccgttacctctggcggtacgattcccgatcgagggctgtacaccgtggtcctgcctgaggcggacgccggcaaaggccagcgtcgcgtcggcgagttggatgaggagatggtctacgaatcgcgcgtgggcgatgtcattacgctcggcacctccacatggcagattcaggaaatcacccgtgatcgtgtggtcgtgactccggctccgggccgcaccgcccgcctgccgttctggcacggtgaaggcgctggccgtgactacggtttcagccgtaccatagcccgcttcacccgagaaatcgccgccggattagacgtgaagcggactgaggggaggtctgccgcagaaggtccagctgtcccaaccttcatcccaacaatcctcacccgtctccaccacgatggcctagatgccaacgccatcaccaacttggcccgcctactctccgagcaacaagccgccactggtgcagtccccagcgaccaaacccttatcgtggagcgcacacgcgatgaagacggcggatggcgcatcgtgctgttaagccccttcggccgccgcgttcacgaaccgtggtccatggccatcagccgcagactgcgccaacgctacggtttcgacgggcaggtatatgccgccgatgacggtatcgtcattcagctaccggacggtgacggacatattcccgctcaggatctgttccttttcgattccgaggatcttcaaacggatgtagaacgtcaggtgggcgaatccgtattattcgcggctcgattccgtgagtgcgccgctcggtcgttgttcatgcctcgttccgacccgggccgtcgcgtgcccctatggcagcagcgactgcgcgccgcacagctcctgcaatccgcacgtatggccaagaactttccgctgctgctggaaaccgcgcgcgaatgtttgcaagacgtatacgacatgcccgccctgaacgaggtgatgaccggattgcaagccggcaccattaccgtgaaggacgtggaaaccgagtcgccatcgcctttcgccgagaacattctctttggcttcgtcggcgtggtgatgtaccagtatgaccaacctcaggccgagcgtagcgcgcaactgctgtctctcgatccgcacgtgctcgaacgcttgctcggcaccaccgatatggcacaagtgctcaacccggacgtgattcgcgaagtcgaacaggaactgggggagcacactttctggaatgagcttgccgacgatgatgtgactggtcgcgtgacccgttacgccaaaacccatggtcctttcaccgccgatcagctcatagccgatctacacctcgatgctacggatgccgtgcacactctggatgtgctggctgccaaaggcgagttgctgcaaggccactttgtagatgatgacgagcaaggccaacagtggctccataaggacgtattccgccgtattcggtctcgctcattggccaaggcgcgtaaagcagtcaagccagtagaatcagaggcgttccagatgtttcttatcgaccgacaaggtatcgggccggtcggcggcgaacgatatgaaggtgctgacgggctcatgcgcgttatcgagcagctggagggcatatcactgcccactgcactctgggagtcggcagtattccccgcacgagtacgagactaccaacctgcattgctggatgagttgctgaccagcggcgatgtggtctgggtcggctcaaaaaccgggggaaccagtgcgatggaccccggtgaggttgctttctatccggcggattcaatattgttcagcggtgtggaacatggtacgacatcgaacgcctcagacgccaccatgccggaagcgattctgaccgcactggactcagggggagcgttccatgcccgtcaactgatggatgccgccaaacgtgcgtggaatgagaccgcggagccggacatcaatccaaacaccggcgaaatcattccgcaagagtggagcgaacagcagttcaaggatgccttgtggagcttggtctggcaaggtaaggtcaccaattccagcttcgcgccggtgcgtgcattaaccgcaggcgcagcaagcccgcgtaaatccactacatcacgtcgtcgtgggcgtgtcgctccgattcgccgagccactacggatatgacgttaggaggtttgtggtccgccgtaatcgggcaagctgaagccgaagacaccgaccagaccgaacgggcactcgcactggtcgagacgttgctggacaggtatggcgtcatcgcgcagccggtgattgacaaggaaaatatcccgggtggctactcagcgttgtatccggtattgaatcgcatggaggagcatggtcgactggtacgaggcatgttcgtccgtggtttcggcgcggcccaatttgccgagcgcgacaccgtggatgcgttgcgtcatccgtcagagcatcgcggccagtccgtggtggcattgagtgtgctcgaccccgcaaatctcagtggctccgccatcgcgtggccggacgcgcctgccggtgcgggtaaaccggcacgccgtatcggagccacggtcgtgctcaatgcgcaaggcgcgctactatacgcggccgccaaagccaagcacctgacagcgttcgatcaatcggtcggccatgaagccgctgtcaatgattccgacgaacaaatgcgcaaggccgccacagaactggcctacgccctcaaacgcaatggcaccggctccgtgacattcagcgacatcaatggcgaacccctcaacgcccgtcaccccttcgcccgcatcctccaccagtccggcttcacccccgttccccaaggcatgcggctgtactgattgagcccagctatcgaatgcggtagttggagcctcgttgggtcatgatgaggccggcgcgggtgagcttcttatccagtgtgtagagggcgttcttgagtaagccctgttgctcgaagaatgggccgccgataagtttgaccaactcgctggtgttgacgaactggccatcagccttgaccagcgcttcaagcaaactgtattccagacgggacagtgagattgcgctgtgagtggatgcgtagtaggccttgtgattcgtggtgtccaacgtgagattgccacgaatgatcatggcgggggagtcggtggcaagcgagccgacgtatgagagcagttcgccatcggagaatggtttgctcagcgcggcatctgggcgtcgtacgttagcttgtgcgctagaggcagcattgtccgagcgttgttcggcttcggcatctgagttgtttgcgcgtgaattcgcgctgaaggagctgtagggcgtctcttcgataggggcgtactcgtcaggcagcgctcgccagcggctgccttcaccaatggttttgctgagtggcgtcgaagtcagcagcagaatcttgacggaggcacgggcattgcgtagggattcgatgagctgctcggtggaaatgccgagcagggattcatcaagaatcactgcgtcaaatgactccttggcgacagcggcgagcgcgatactaccggtgcttgccaaagacacctcatgacgaccggcaagcagggcaccatgaatggcgtgggccaacggttcattggatacggcaaccagtagtctcatcgccacctccttaatgcttagtgtaggccgggtttagggtctcttctctattgtttggctcactatcgttcgctcctcgcctacaaacaccccactggggtgtttgctttacggctcggcccatcagagggagcttaattgaggttacgcaatgaaggcgatgggggaggcgaggtctactccggaaccgtctcggcgcatatcgggcttgggaagctcgaccggagagcctgcggatgtagaggcgtgcaacgggtagaggcccacccaggcaagaatcagcgtgttctggcccttcaggaatcgctgggaacgcacgccgccggtagcgcgacccttggtggggtacatttccagcggagtgaccttcgccgcgccgttttcggtgccgggcagtgcatcggaatcgccggccacggtgagcaccactgcaccggatccggaagtcaagccgttctcgccctcttcataggtccatgccaccttgccggcgggaaccacgttgaaggccgccacacgggcgccctcggccagcttgatgccggccataccgcccgcagtacgaccctgcgggcgcacgttcttcgcctcaaaggtcagtagcgaggaatcggaggagatgaacaccagacggtcgtcatcctcggccacggcggcgaataccacttcgtcgccatctttcagatcaatgacgggccaagaatccatggtggtgggtgcctcacgattccaacgcttgatgacaccgttacgggtaccgatagccagcgacggcaacggcttggcctcggcggccccgccatcctcgctctcgtccttggcactggtcttgccggacgtcggctgctccatggcaatcgccgtaatcacacgctcaccgcgaatcggatcggtggattcggtcatgccgatcagttcgtcggcctgaactcctcccttcagcgacaatgtggcggtagcgggcaaggcaggcaaatcaaccacatgcgcgagcaccaggcggccggccgacgtgaccagcccatacgtagcgcgcgtggaagtctcgaagattgtggtgatctgatcgtctctcaaacgctcatcggaagtggatcgtgcattgaacacgtccatcgcgcttggcgtggtacgggcaatcaaaccggtagcgctcatcatcaccacgcacggctcgtcctcgatcttcaaggctccggtcagcgtggactgttcgccggtcttcttggccgcagctgcggctgcggccacatcggcttcggcggaggagatcgtagtggcggccttcaccgcttcgagcgcggacttggacacgcccgaagccccggcaccctgcgccacgaccggcgtcaacgtgccatccgggtcggcatccagcagcacggtacggcgcggcgagccccacttggcgaccgcttcgtccatctcgtcggtgaccacctggtcgagcgcctcggcggaggccaggatccgggtcagctcctcgatacgcttcttcagatcatcgcgttcggcctcaagctcgatacggttcatcttggtcagtcggcgcagacgcaggtcgaggatgtactgagcctggacctcgtccaaatcgaaaacgaccatcaaacggctcttcgcggcatccgcatcatccgaggtgcggattacctgaatcacctcgtcgatgtccaacatggctagcagcaggccctcgaccaggtgcaggcgctccagcgccttcttcttgcgatattcactgcggcggcgaatcaccacacggcggtggtccacccacacctgaagcatctccttcagacccatcgtgtgcgggcggccctccaccaacgccacgttgttcatggcgaagttgtcttgcaacggtgtgtgcttgaacaactgcaccagaaccgcatgcgggtcgaaaccagtcttgatctcgatgacgatacgcgtgccgttatgacgatcggtcagatcgaacgcgccggaaatcccctccagcttgcggttcttcacaccgtcggaaatacgttcgattaccttctccgggcccaccatgtacggcagctcggtgaccacgatggcctgcttgcgggccgtgacatgctcgatatgcgtggcggcgcgcgtggtgagcgtaccacggccagtggcataggcctcacggatgccgtcgcggccgatgatcgtgccgccggtgggccagtcggggccgggcacgtaacgcatcagctgttccagggtggcgtccgaatgcgccatgaggaacttggcggcgtttaccacctcgcccagattgtgggtggccaggttcgtggccatgcccacggcgatgcccgagccgccgttgaccagcagattcgggatggcggccggcagcacggtcggttccttgagcttgttgtcatagttcggcgtgaagtcgacggtgtcctcatcgatatccgcgttcatgccgagagcggccgggccaagcctggcctcggtgtaacgggaggccgcagggccgtcatccagcgagccgaagttgccgtggccgtctaccagcggcagacgcatcgcgaacggctgtgccaaacgcaccatggcctcgtagatcgcggaatcaccgtgcgggtggagcttgcccatcacctcgcccaccacgcgggcggacttcatatacgggcggtcgggagtcagattcatctcgcccatctggtagacgatgcggcgctgcaccggcttcaagccatcgcgcgcatcgggcagtgcgcgtgcgtaaatcaccgaatacgcatactcgaggaaggacttgctcatctcctcgttcagcggcgtctcgacgatatgctccttgaccgtgcgcggatcataggtttgcgcggacggtttgcggtgtgatgccatgaaactccctttcgaacgcccccatattagcgggagggcgcgaaacagtgcgcagagaacggttctcgataacaactgtgcgctggtttcggtgcgccaatcgcacatgtttgccgataaaacggcgtgattccagtgtttcagtcgatgtgcgtttgtttgattatgtgcgttggagcgcacagttgttattgagaaccgttctctgcgcactgagccaaggggaggggtgctacttgaatgggcaactatgagtgttgagacgccggatatggacgagttgctgcggctggtgcccacagtgggctatggggacgacgccccggccgatcggcgtgggggagcactgcacctgtccgccgtgctgcccgccttgtccgccgccatcggacatccggcccccaccaaggtccacgccgatcccaaggcatgccagcgcgcgttggggctgcccgatgccgaatcggccatcgtggtgctcgtggacggcctgggctactggaacctcgccatgcgcctcggccacgcgccctatctgcgttcgctgatgaacgaaagcgccaatcagcgtcccatcgctacctgcgctccaagcaccactgtggcggccatggccgcattcggtaccggaacctgcccgggactgaccgcaatggcgggctatacgcagctcgaacccgccagccataagctcatccaactcatccagttcaaagacgcgctggcacccaaaccagccaatccgcacattcctgtgccgcccatggtcgatccgctcgacctgcagcgcgaggagacggtgttcgagaaacttgcggctcaagaggtgcgcgtcacgagctcggggttgcccaagttctccaaatcgccattgaccgaagccgcattgcgaggcaccgactatcaaggcaacgtcaccccacgcgatcgtgtgctggccgccgcacgcgcctcccgcacccccggcctgacctacctgtacatccgtgacgccgacaaagtcggccacaattacgggtgggattccgaacactgggtggccgcattcgaacatatcgacgcccagctcgcgctcctgaaacgcagcgcacccaaaggcacgctgatcgtcatcgtagccgaccacggcatggtgcaaaccgacatggaccagcggattgacatcgccgttgaaccgcagctcacccgaggcgtgtcactggtcgggggggagccgcgctcgctgatgctgtatgccgagccggatgaacgacctgaggatatagcttgccggtggcgcgattgtctgcaagaccgagccttggtgcggaccaaggatgaggccatcgcggacggattgtttggaccggtctgcgagcgagtccggccaatgctcggcgatgtggtcgtgcaggcagcgggagccgtgaccctcgtcgattcgcgtacgcaaggagacaaggccacccacctgccgagcgtgcatggctcccaaacagcattggaaatggatattccctgcctgatcgatatggcctgattcggaaattcagtctccgaacagaatctcgtcccagcttggtacggccgaacgtcctgatttacgcttggccggtttggctggtgcctcatgttcggtggcggcggattcggccgcccgctcctgctcggtggctactagctgtgcattggggccactccgtatggtcttgtccgaaacattgtcagagccctgctctggtgccgtggcaggcgattgctgtaatcctgcggcagatggcgaaacagatccggcggtctgcgaagagaccggactgggggccgtagtgccatgagcctgggtcgtggccggtgagatggacgtggatagatccactgggggcatggaacctgtggaagtgacagagggccggattgcggcaggccgtgcggccggaatcgaaggcgtaggagccgcccaagcagacacggcgcgctcgatacgcgcggagcgtacggagtcgccgggcagttcgggaatcgtcggcttgagtttggaatccgtggctgattccggattctgttcgccgagcagttttcgagcggcattgttcaggctcatcacggaattgtcgtgcatattccacgtccattcggcatggatctcacggcccgcggaagtgaatatcgccacgatgcgccaaggctcaagtccacgtcgggtggatttccaggtcactgattccatgccgattcccgcagaggccagcgtgcgttccaccagttcgctgatggtgcgcaccctgctgtctttgggtgccgccacggcaaggaactgttcgatggcatactgtttctcggtctccacagccatggagaaacgacgtaccagcatttcgctcagatgatatttctccgcgacacgggccggatcggcaccggcgcgaatcagcgactgtatctgggaaatcggcaaagtggactgctgatgcggctggggagcctgtcgcatctcgcttctgacctgcttggcctcaagaatcgcccgttcgagcgtgtcgtccacgctcacagccatttccctgccgccaagggagaatacgaggtcccccgtcttgctcacgcgcacgaaacgggctttttcaagccgatcatctggcatattcgcaccactttccgtcgcaaagacattacttcttttaagtatgccccacgtgtcgaactttacgagtatttcaaatcgtgtatcctatgggcgagtacggcgctgaccgtgctatatatatcgacttacgaaccaaagacgacgaaaggaccatgatggctcaggattatgattccccccgcaacaaggatgaggacgaggaatcgctgcaggcgctggggaagtcctcgcagaacgcctcgagcgacatcgacgacgatgagaacgccatcgccgaagactacgaactgccgggcgccgatttgagcaacgaggattcctcggtgaccgtcatccccatgcagggtgacgagttcatctgctcgcagtgcttcctggtcaagcatcgcagccagctcgcctacacggacgaggatggccagccggtgtgtgaggagtgcgccgcctgatggcgttcgacgagacctacaacgagcccgaatccaccgaggtcctggtcaagagcctcgaccccgaacatccggcccagctgcactatgcccacgcgggcgatgccggtgccgacctcatcaccaccgtcgatgtgacgctgaagccttttgaacgggcactggttcccaccggcgtggccatcgccctacctgcgggctacgtggcgttggtgcatccgcgttccgggctggccgccaagcagggcgtcaccgtgctcaacgcgcctggcaccgttgatgccggctaccgtggcgagatcaaggtgcctctgatcaacctcgatccgaagcacaccgccgtcttccatccgggcgatcgcatcgctcaattggtgattcagcggtatgttgaggctcggttcatcccggccgagacactgcccggatccgatcgcgccgaacgcgggttcggttcgacgggagtggcgtcctgaccggattaggccggttgaatgactaaggtgatgacggcaacaacggttgtggaaccaatgatggcgaacaggtgaatgcacaaggctccggttcgcggctacaatgaacttcatgacgagggaggtgactggcatggcagagattgatggcgagcagtacgccgcccgtaagttgggttgtgagatcagtgccgatccgctcaatccgctggatccaatcaagaaggtgtgcaagtcccatcaccccgatgaggatttgtccattcttgaccgtgcctaccggcgtgctgtcatccagcactccgcccagcgccgcaagtctggcgagccgtacatcatccacccgctggccgtttcccagattctcgcggatctgggcatgggcccgatcgtggtggcagccggcctgttgcacgacacggtggaagacaccgactatacgttggatcaatgccgcgccgaattcggcgacaccgtggccggtctggtcgatggcgttaccaagctgagtcagcttgaagtgggtgattccgcccaagccgaaaccattcgcaaactcgtggtggccatgagccgcgacgtgcgtaccttggtggtcaagctcgccgaccgcgtacacaacgctcgcacctggcgctatgtgaagaccacgtccgcccagaagaaggcgcgtgaaacccttgacgtgtacgcacctttggccaaccgactcggtatgaacgccatcaagacggagctcgaggaactgagcttcaaggtgctctacccgaagatctacaacgagatcgtggtgctggtggctcgccgagccggccagcgcgatgtgtacctgaagcagattctggcggagatcaacgaggatctcgacgagcagaacatcaaggcatacgtcaccggacgcccgaaggattacttctccatctaccagaagatgatcgtgcgcggccatgatttcgcgaacatctacgatttggtcggtgtgcgcatcatcgtcgacaccattcaggactgctatgcggcgcttggtgccgtgcatgcgcggtggaacccggttcccggccgattcaaggactacatcgccatgccgaagctcaacatgtaccagtcgctgcacaccacggtggtgggccccggtggcaagccggtcgaaatccagattcgcacttgggacatgcaccgccgcgccgaattcggcatcgccgcgcactggaaatacaaggaaaacggccaggccggccgcgccctgagctcgccggacaagtccgatcgaaagcgtgatgaaaacaatcaggagctttccgaggtcgataacctcaaatggattcagcagctcgccgactggaccagcgaaacccctgattccaacgaattcttgggctcgctcaaggaagaccttggctcgtccgaagtctacgtgttcacgccgaaaggcaaaatcgtatccctgcccgctcacgccacgccggtcgacttcgcgtacgccgtgcacaccgaagtgggccaccgtacgatgggcgcgcgcgtcaacggtcgtttggtgccgctcgacaccacgctcgataatggcgataccgtcgaaattctgacgtccaaatccgatacagccggcccgtcacgcgattggctgagcttcgtcaagagtccgaaggcccgcaacaagattcgtcagtggttctccaaggagcgtcgtactgaagccatcgaggagggccgcgacgagctgacccgcgcgatgcgcaagcgcaatctgccggtcaacacattgcttacgcccgaagcactggtgggtgtggccgacgaccttaacttcccgaacgcggacgccgtgttcgccgccattggtgacggacaggtctccacgcagaacgtcatctcgcatctggtcaaggatgcgggtgccgacgaggtcgatgaggaagtcgagcaggaagtcctgctgctgaagcccatggaacgcaaggcctccagcagctccaccggcgtgtccgtcaagggcgtgggcgatgtgtggatcaagctggcccgttgctgcatgccggtgcccggtgacaatatcatcggcttcatcacccgtaatcagggcgtatccgtgcaccgcaccgactgccagaacatgatcgatctgaaaaacaagcagcctgagcgtgtggtcgaagtcgaatggaccagcaccaagggcctgttcatggtcaagattcaggtcgaggcgctggatcgacgaaacctgctttcggacgtgacacgtgtgctttccgaccatggcgtgaacatcatttccggtacgatcgccaccggttccgatcgcgtggccaccagccagttcagcttcgaaatggccgatccgcagcatctcaactcgttgctggcagccgtgcgcaagattgatggcgtgttcgacgtgtaccgcatcactggtgccaaggaatccgccgaacctcgactgcgcaagatgaagtaggccgttaccttactctggctccctctcagagaggggagccaagaacacgaaaaggtcctgactggaatacctgaactgcgccccgattgttggacgtggtttattaagggtacctgattaggctgtgagggacatgttccggaattcctccggggtgtgtccctccagtcgtatctggcggcgtttggtgttccagtggatgatgtacgcgtccagttcgttcttgaactgttcgtatgaggcgaactcgcgtccggcgtggaactcgtccttgaggtggccgaacacctgctcggtcgcggcgttgtcgatgcagttgcccttcctgctcatggactggcggatgttcagtcccgcgagccggtcgcgccaccaccggtgccggtactgccagcccatgtcggagtgcgggatcgggtcggcgtcttcgggcagcttctcctcgagcatggcgagcaggcgccactgctgggccatgtcgggatgccggctgacgtcccaggccacgatctccttggatcccatgtcgtatacgggagccagatacgccttgccgtcggcgaccctgaactcggtgacgtccgtgcccagcttcacccacggccggtcggccgtgaagtcgcggttcagcaggttctccaccctcgcgtccgtctcgtcccggtacgagctgtatttccggtacgggttcggcctgcgtatccggcattccaggcccatgcgcctcatgaccttcagcacgctcttgtggctcacccgcaccccgaactcgtgcacgaggcacatgcgtatctgccggtggccgcacccgttgggcgtgcgcgcgaatatctcggcgaccatcggctcgatgtccggccgggtcacggcggccggatgcgacagaagatggtaatacgtgcttttcgccagtccggccgccctgagcaggtgccggagccgatgtcccagccccgccagcatggagacgatcaccgttctgtcccggttgccgatctccacgccagcagggcgtcgactttttccaggtacgcgaccctcgccttgaggtacgcgttctcctcctcaaggagctgttcccttgtgggagccggcctcggcttggatttcgcgcccttgggcctgcccttcggtttcggacgcagcgcgtccgggccgccggaccggtactcgcggcaccagcgctccaacggggtgggacccgcgatcctgtacttctccatgacttcggccttcgtcagcccatgctccacatggtcgcgcaccgccgcgagcttcgtctcgtagtcgtatctcctgttgccttcgcgttctcccatgagcgccgcctccccgccaaaccggtatgacaacacccattttcccgcggtactgacgggcacgccaagccggcgggcgagagaacgcctcccggccccgccccggatcaggtcggcgacgacccgcatgaaaccgtcatcgtaatgacgcctgcgatccctacacatgagaaaccgcacctccgatcatcgaatctgaattacttcagtccaacaatcggggtgcggttcagaatcaggaccttttcgtatatgttgtcggtcttactccgccacgtccacggacagaatcacggccggctcgagcgggcgatccatcggatcggtgtccagtgcttcgagcttatcgacgaccttcttggagtcgtcatcggcgacctcaccgaagatggtgtggtgaccgtccagccacggggtcggcacggtggtgatgaagaactgggagccgttggtgccatggaccttaccgtccatgccgcgacgcagaccggcgttggccatagccaacaggtacggcttgtcgaacttcaggctcgggtcgatctcatcgtcgaactcgtagccagggccgccggtaccggtgcccagcgggcaaccgccctgaatcatgaactgcttgatgatacggtggaaggtcaggccgttgtagaacttgccgtgggaaggctggccggtgtacgggtccgcccattccttctcgccggtggcgaggcccaggaagttggccacggtgttcggagccttgtcgtcgaacaggttgatggtgatgctgccctcagaggtattcataatgatggtagtcatacgttccatgttctcattgccccacgtcattgactggcattgccgccatcgctgctatcgagtcggcgattgtcagccaatgaatttgatgccggttccgctgctgctaccggttgaggagccgctcgaaccgctattaccggagtttgaactggatgatccgcccgtggagctggaagaggaaccggagccattggctgatcctgaacccgatccggttgaaccgttgccggtgccggtggtgcctccggtggtgccggaaccggtggaaccgccagtcgtgcccgaattagtggaggaatcggtgccggtcgaaccatcggtggatccattggtgttggaatcggttgaggagtcggtgccggttgagccgaacgtgcttgaatcggtgccgtcgttggacgagccggatgtggagtccttggtgttggaatcattcgaaccgtcggtaatgcccggctgcggcagtccgttattctgattggacgtgtcggtctgcgttttggtgtcggtttgcgtgggcgtggtggacggagtgatgatatggtccgtgccacggccctgcgtgaccagcatgacgatgccggcggttactgccacggcgagcaggccggataccagcgtgacgataatggcggtgcgcttcgaattatgggagcgggccttgcgcagttcattgaccgaataggttcgtccgttcgctcgattggacacgacttcgcgcggcttgcgcgcggtggaaacggtattgaccatgccggtcatcgtcgtatcggactcggattcggctgccttatcggacttattatccgtagtgtcatcgtcattgccggaagacgaggccgactgtagtttctcaccggaggcggtgagtatgttttgatagattttggtggccaccgcggagacgatgtagctggctgccgcgccgattaccgagccggcgataccgattttcgatgccagtaagaatgaggtgacggcggcaagggtgcccgccacgatggatgagagggaaagaccttcgaaaaacttcttcacaagacacgaccgtaaagtgtcgggctggaaggttgcttaaggctcggtgataccgagaggatgcctacacgagaccttcaaaacctagccagcggaatgtggaatgactcaaaaatatggtgccgatgagcagtgggaatcagcgcaaagtggcgcaaagtagcgcaaagaacaaccgaaattggttcgcttggagcgaaaacgacgttcagcagaacgtcatgcagcccaagcgaagctgccgttgccggcacccaactcgaaatgcagtttggcgatgccaagtccgatttccgattgcacgccttcaagagcctcggccttcaccgtaacggttcagggcaatggagaacccatgaccatccatggccgaaactgaatcgtcagttccggtgcagcgactgtttggtcggcttgattaccgacatcagcacggcgacgaagatcagcgcaaagcccaccagtgaactccacatgattgtctcgccccagaacagcgcggagaacgtgacagcgaacagactttccgtacacatgatgattgacgcctgcgaggcaggcacgtgagccagaccgatgttctgcatgatctgggcactcatcgtggcgccgaggaacagatagagcacgctggccactactgagggtgccagccagctggcgttcggcatgggttcggtgaacaacgcgccgatgatgaacaatacgccggcaacgccgaactgcacaaaagtgacggcgatagggtcgaagcgtttggtgtagacaccaaggcaggtcagattgaacgagaagatgaccgcggtggcgatggtcagccagtcgccggcactcagcgacagcgaaccgcccggcttcagcgagacgaagccgacgccgatcagacagatcacgccggcgaccagattgatggccttcgggcggttttttgaaataatccacgtggcgaacggggtgagtacgcagtaggcggccgtcaggaacgcgctgcggcccggttcaatggtctgcaggccgatggtctgggtgaccatcgtgccccagtaggtcaggcccaccacgagcgccggcacaatgattttcggcgtcagatacggcacgatgtgcttatggaacaaggccagcatgcacaggcaggcgccgatcatgcgcagacccatcagccattggggcggaatcgcctccatggcgaatttggcgagcagatagctgccaccccataatgcagcgcagcccagcaacatgagtcgggcgagattcgggggaaagttgcgggaccagcggctgcgcagcttgctgaaacgttcgaccaaacccatggtgcacctcaggacagttaggaaaacttgtggctctctcggctcacagattacgggaactaccggccaaaatcgaccggtcgatgggtgtcgggtgtgtgacaggtgtgtggctggtgcgcgaccggggcatggcatcgccaagcaggcaaaaaccggatgaaagctgtgcgaaggtgaggttactcacagcgaacatccgggctagtcgcgttcgaaaccggtactctggaaagagtaaggatacgttatccgtagcaatcatgaaaggattcgacatggcagtcattactccggaaatcaaggaattcatcaagaacaaccttggctggatcaccaccgtctccaaggacggcgaactggacctcggcccgaagatgtccctgttcgtgctggacgacacgcacatcgcctaccacgagcgcaccgccggccagcactatgagaacctcaagaacggttccccgctggtcatcgctttcgccaacctcgagaagaagcagggctaccgcttccgcggcaacgtggtgctgcacgttgacgacgacatctacaacgagcaggtcaaggtcgccgaggaaaagggcaccaagaagccggccgtgattccggttctcgaagtcaccgagatccaggaccttgcctccggtccgaccgccggcaagaccatcgccaaggactgattagctgacgtattggtggcttcctcgtcagagggagccactttttcgctttttagtgcgcagtactaggtgacggccttgggcgtcggtggtggcgaagaggtaggtgctaccaccgtccttgagtttgagttttttgcgcagctgggccacggttagggggaaattgcgtacggcgatgttggcgtgcgtgaggccggccaatagctgtttcagttctttcttgttcatggtggcgatggattcgatggcgaatgacctgcctggaaaatcggcaataggttcggccgccacgaacaggtggctattcgggctgatgtgatgcacggcgaagcgctgttcgagaacatcaaagcatccggccttcatgattgaggcgttgggctcgtaaaggtacttccaatgcgaggaatcgaagtcgttcgcgctttcctcagacagggaatcttcggtattgcaagtattgcgtgcagccaaggcagaatcgctgatagtggtgtgattgtcgctgttatcgccggccttgtacgacagcacctgctcgtcattagcacataccacgagcggtgaggcgtaacggccgcgccccaacaccagcaacaattccttgcactcattcccggtggagacgatatgcacctcatgtaccgcgccggcgaaatcggcgacggtcttatgccagtcgagcatgggggagagcttgaccatgaccgtcggtgccttggccagcagcatatccttcagggtcagcacatccggcatgcaatcggcaatcgcgtaggtacgcgagccatgatcgtcacggcgggccggatcgaggaagatcatggagactcggccaagcgtgtcaagcactgctgttgaatcatcattgatgacttcggcgtggtcaaggccgagtatcgggaaattatggcgagcgatatcacataaaatggattgttgttccatatatatggcacgattgaacactcgggacatgtaagaaaagtcgacgccgaaaccgccggtcagatcgactagggatgccggggagtcgtcgtcgactgcttcttcggccaacaatcgctgtgccagccgagccttgtactgtgcggtgaattggctggaacattgttccattgggacttgcggcgggaaaatcagcccatcatgggacgcccagtcaggtagcttgagtgaagcgcgctgccagccggcaatttgctccagcgcgaacggcacatccacgtcgccatcatgcttggcgtgcaaggccacatcacgcacatcttcacggcggtgtttggcgatgaacgcccaagtcgactcagaaatctccatgccgccattctaggggttgtgctgagatgagtatggcaaaccgcaagagaacgaggtggcgaaaaccgatgatcgatgaagtgatgatgctgcgtcatggccgtacgcaatacaatctcgaacatcgcttgcaaggccagatcgatgtgccgctcgacatcgtaggccaatggcaggttgaccagaccggattcgcgctcgcttcacggtattactgggccaaggtgaaccgacttgccgagcatcccgaagccatcgcccagcccggtcctgacgccgccgaacgcactgatacgcgccagttcgaggaggctcccgccgccggccggcgcatggtggtgatgacctccgacctgttccgtgcccaacagaccgcacacgccttcgccgatattttgggattgccagtcacctgtgaccaacgactgcgtgaacgcagcttcggcgagtgggaaggcatgacccgcgccgaaatcaaagccgtggcagccgacgactacgcctcttggaaacagcacactgggggcgaaaccaagcatggtgtggaaagccgtgccgccgtggggcagcgaggtgccgatgccgtgcgcgcactggtcatcgactccgcctattcagacagcacgcccaccacgctgatgctcgtcacccatggctcatggattaccgccaccatctccaacctgctcgaacttgacccggacggcatgaacgcactcggcggcatgcgcaacgcctgttggtgccggctcaaagtgcgccacagcgtcaacggcacccccatcgaacagcccctgtgggagttggaggaatacaacaaggctcccgccatcgccgacagcgccgactgggagaacgggccgaccgatctgcgaggaccgcacatgccaagttggcagccaatcgtctggtgatggtcgctatgcgaaaccccgctcgcaaattcgaacggtgggtctagactaatctcggtttggaaccgtacagcgatagaacagtaagaaagcgcggaaggcgggtgagacgacatgctgagaatcttcagctcaatcaatggccaagtggagcagatcgagaaaccggaaaacggctcctggttatgtttgagcgaacccactgatgtggagctcgccaccgtcgcctcgcaaaccggcatcgacctggccgacctgcgtgcccctttggatgacgaggaacgttcacgtgtagacgtcgaagacgattacacgatgatcatcgtcgacattcccaccgtggaagagcgtggcggacgcgactggtacgagaccatcccgctgtcgatcatcgtcaccgaaaacctcatcatcaccgtctgcatgcaggacacgcccgtgctccacccattcatggaaggcacgatccgaggcttcaacaccttcatgcgttcgcgcttcatcctgcagatcctgtaccgcaacgccacgatgtacctgcgttacctgcgcatcatcgaccgcgaaagcgacaagcttgaactgaagctgcgccactccatgcagaaccgcgagatcgtgatgctcatggagctgagcaagactttggtgtatttcaccacatcgctgaaatcgaacgaaatcgtgatggagaagctcaccaccctgcaacgcatcaagcaatacccggacgacgaggacctgctcgacgacgtcatcaccgaaaacaagcaggctatcgagatggccaacatttacagcggcgttcttgcgaacatgaccgacgctttcgcctcgatcgtgtccaacaacctgaacaacgtgatgcgcatcttcaccatcatctccatcacactgtccatcccgaccctgatcttctcgatgtacggcatgaacttcgatggcggcatgatgggtatgccgttcactgacaagccgtggggtttcatgctcattatcgtgatttccatggtgctctccggtgcggttgcctggttcctcacacgttcgcgcatgttcaagtaaggcgtttgacggttatgcaccactggtcatcgttcgccagccgtagcatgctccgcgctcgccgtccgatgcggcgcggatttcgctcccgactgatggcaggattcgccgcggcctttggcgtgatattgccattatccggtctggccggttgcggccaaattcaagtcaccaccgtctccggagcgccggaggggcccaccatcgccattggggtcgcagccgacgagccatcggtgggagcatggcatgacggcacataccagggcttcgacatcaccatcgccaaatacgtggccgccaaactcggctatgcgaacaagcagatcgtcttcaaacaggttcgccccgaaaaccggcgctccatgctggacaatggacaggtcgacatggtcgtcgcctcttggcctatcaccgatgggtccagtgcgatcgttgattttgccggaccatacctcacgaccagcgtcggtttgctggtcaggtcggatgagcgtggccgattcaccaatgacgcaggttcggtgggtgacgtaggcgacggcacggtgtgcgcagtgaaaggtgacgagacagtcggcatcttccgcggcaaccacccgcaggctcggattcaggagcgcagcagttatgcgcagtgcgtcacggccgtgcaagtagggtcggcggatgccatagcctccgatatggcggtgctttccggtcttcaagcggccaacgggccccagtatatggacgtgattgcggacaagggcgaggtcggttatggcatcgccgtgagtcaaggcaccagccaattggcgcagaaaatcgcggaagcattggaagacatggttgaggatggcagctggacggccgccaaggatacgttcacaagccaaacaaagctcacggtttcgctgaacggcgaccccaaagccatcgtctcggatgctgaataacgattgacgacgtgtccagttgcgaggctaccttgctgatttatgagtgacaacgagaagagcacgcaaaccgaagagcccaacttccgctacaacgccgcactggcgcaggacatcgaaaacaagtggcagaagatttgggacgagcaaggcaccttctgggccgccaacgtcaacggcgatttgaaggacggcaagggccgtaacgccgaaggccgcaccgcctacttcgccatggacatgtttccctacccgtccggcaagggcctgcacgtcggccacccgctgggctacctggcctccgacgtggtgagccgctaccaccgcatgaagggcgagaacgtcctgcacgccatgggttacgacgccttcggcctgcctgccgaacagtacgcagtccagaccggccagcacccgcgcgtgaccactgaggcgaacatcgccaacatgagccgccagctgcaccgtatgggcctgagcttcgacaaccgtcgtacgttcgccaccatcgaccccggctacgtgcgctggacccaatggatcttctcgcgcatctacgattcctggtacgacgaggacgccaccaacccgtccggctccaagggctccgcacgcccgatcgccgagctcgtggccaagttcgaatccggcgaaaaggccattccgggccacgagtccgatggcaagcagtggtccgacctcactgacgccgagcagcaggatatcttgaacgacttccgcctggcctacatctccaagtccccggtcaactggtgcccgggtctgggcaccgtgctggccaacgaagaggtcaccgccgaaggtaagtccgagcgtggcaacttcccggtcttccagcgtgagctacgccagtggtccatgcgcatcaccaagtacggccaccgcctcatcgccgatcttgacggcatcaactggcctgagaaggtcaagctcatgcagcgcaactggatcggtgaatcccatggtgcctccgtgcacttcatcgtggccactgccgacggtgacaaggacatggaaatctacaccacccgtcccgacacgctgttcggcaccacgttcgccgtggtttccccggaacatcacctgctggagaacgtgcccgccgaatggccggccgatgtacccgaagactggaagggcggctatgccaacccggtcgaggcggtgaaggcctaccgtctggccgccgaagccaagaccgccaaggaccgcgtgaacgaggccggtgagaagaccggtctgttcaccggcctgtacgccaccaacccgatcaccggcgcgaagctcccgctgtttactgccgactacgtgctgatggactacggcaccggtgccattatggccgtgcctggtggcgaccagcgcgattacgactttgccgtgaagttcggtctgcctgtcatctacaccgtcacgcctctgccggattccggcgacgacttggccaactacgagggcaaggcgccgttcgtctcccatgacggcatcgtgatcaactcctccgtcgaggccaccgaagccaagggcgacgcgctgagccttaacggcctgcgcgtggacgacgccatcgccaaggtcaacgcctggctcgaatccgccggcgtgggcaagggcaccgtaagctaccgtctgcgcgactggctgttctcccgccagcgctactggggcgagcccttcccgatcgtctacggcgaagacggcaccccgcacctgctgccggattccgcattgccgatcaacctgcccgacgtgcccgactatgagccgcgcaccttcgatccgatggacgcagagtccaacccggaggcaccgttgagccgcaacgaggactgggtcaaggtcgagctcgacttgggcgacggcaagaagacctactaccgcgacaccaacaccatgccgaactgggccggctcctgctggtactacatgcgttacatcgacccgaccgacaccaagcacatggtggagaaggacgagttcgactactggatgggcccgaaccacaacaagtactcgggtgatgaaggcggtgtggacctgtacatcggcggcgtcgaacacgctgtgctccacctgctctactcccgcttctggcacaaggtgctcttcgacctcggctacgtggactcggccgaaccgttccacaagctgttcaaccagggcatgatccaggcctacgcctacaccgacgaccgcggccagtacgtgccggccgacgaggtcgtggaaggcccggccgacgcctccggcgagccgaccttcacctggaacggcgaacatgccaaccgcgagttcggcaagatgggcaagtccctcaagaacatcgtgaccccggactacatgtacgagaactacggtgccgacaccttccgcctgtacgaaatgagcatgggcccgctggacgagtctcgcccgtggaacacccgcaacgtggtcggtggcatgcgcttcctgcagcgtctgtggcgcaatgtggtcgatgagaccaccggccaggcccatgtgactgaggacacgccggacgaaaagaccctgaagctgctcaacaacacgattgccgaagtgaccgcggaaatggaaggcatgcgcccgaacaccgccatcgccaagctcatcgtgctcaacaaccacctgaccggtctgaaggctgtgccgcgtgccgccgtggagccgctgatcctgatgctcgcgccgattgccccgcacatctgcgaggagatgtggagcaagctcggtcacgccgaatccctgtccgccgagccgtggccggtggccgacgaacgctacgtgggccacgacaccgtgaccgccgtggtgcagatcaagggcaaggtgcgcgccaagctcgaagtgccggtcgacatcgatccggccgatctcgagaagcaggcgcttgccgccgtcgccgaccgtcttggcggcaaggagccgcgcaaggtgatcgtcaaggccccgaagatcgtctccatcgttcccgcggagtgacttgttgcgagccagctcccctctttgaggggagctggctcgcgtagcgagactgaggggagcgtcaaccgcccacctcaattgtggataacttcataagctagaaccacataccccgtttcagctggacaaacgcccatgaatccatcagcgtggatgcatgggcgtttctcataaccatcgcgcagaccatgccgccaaccgtttgcgcgcattcagcaggcagagcgcagccatgccccaaccgcgagtggaacggcccacgacgcctccgccgcctcctggccatgcacggatccgtccggctggccacccgccccaaagggcgcagagcggcctgcggcaggcgacccgtgacaaacgtgcgttatcggatctgattggcgtacgttccgccgatgccgtcggcgaatcagccagactcacccgggatcagccgcgattgtcgttcaccattgggcatgccttggccgtgatattgctgctgatcgtcgcccttggcatcagcttggcattgctggtccaacagtcgatgaatatggccatgctgtctcaaccgaccgccatgcagaccacgggcggctccgctggagatcagacgatgccatcgcagaacaccacggacgagaaacgcacggatccgcagcagtcggagcattccgatgccacagcgaaccccgaatcggataccacgcaatctccgcacatgcagacggacggcagcgatgccggcgcttccacgcatggtcttatcaacctcaacacggctaccgctgaggaattgcaatccatcaaaggtattgggccggttaccgctcagcggatcattgatcatcgcacggcgattggcgggtatacatcagtcgatcagctgctggatgtcaaaggcatcggctccaagacgttggagaccatgcgagggcaggtgacggtcggatgagcagggattggatactgcgcgagcaggggggccgcgattggaggatgctgccgatcgccatagtgatgtgggcggcgagtctgggagcgcacgcattattcgcatggaggatgtctgatggactcggcactggtcaggcaaaggccgatgccggagctggcattgacgtcaccataatcggcatggaatggcctgtcacacgaatattgcctataacagtggcgtcatgtgctgccgtggcggcgatgatcgtggtgtctttccgcctgcggatccggtggacgggaacattgaccgtatgcgttgcggtggcgtgcatcggcagtatgacggcaatcgcgtcggacaccattgcctggcatgatcctgcctccgcacaagctcgccaatccagttcataccacgaagtcatggccacggtgacgacgcccgtgatcgcttcggaccaacgcacatacgattgtcagacggacatacggctgagcggcatcactgtggatggtacggatgtacgttccacggtcgctgtgcgtgtatacgccgacgaatcgtattgtgggcagttgcgtcgaggcgcggtccatctgctgacaggcgtattgcagcaagcgcgatatggacgcataccactatggctgctcttggaaggaaaacagccggtagcacaggtgcgggctccgccgtggcatctcgccgcgattgcgcatgtgcaggaggcgtttttcaccgtgaccgaacaattgtccgatcaggggcgtgtgttggtgccgggattgacgatgggtgtgcttggccaggattatatcggcggcgagaccggtccgatgccggtcaacagcacgtatgcgcaaacgttggagaatcagttccgccagtccggcatcatgcacctcatggccgtatccggcggccactttgtactggtggcgggattggtgcgccggttatgcatgtggatgctgcttgatcggcggctgacggcgttgctggtctctggagtatatgtgctgctggcattggcgatgttccccagtgattcggtcacccgcgcgttcatcatgggattgataggtgcgttgacgtatgcgatggggcggcgtacgcaagcgttgagcgccctgtgctggacggtaatcggtgtattggcggtgaatccggatatgtcggccagctacggattcgccttgtcttcggccgccgtactgggtatcgtgctgtttgcggggcggctggccggtgcctttgagcgagcgatgccgcacggcatcgccgaaatgatggcgatgaccgtggccgcgcagttgttcaccctgccgattcaggtgttgatggaaccggagttgccgttgctgtccgtgccggcgaacctgttggtgtcgccgtttgtgggattggccacgatggcgggattgatggcattggcctgcgcatggtgcgagccatggctggccggcgtattcgcgtggatatcgtcatggggcacgctggtgatggaacgggtggcgttgtggctgggtggcagcacgatggccgtcatcccatggaaagatggcgttacgggtgccgtgctgattgtggcggtggaaatcggtatcggcatgctactggtgttcgtcagccgttgcctccagcatgtccgtcgttatgaggccggaatgcctggcgtgcgcttcggttccgcttggcatgtccgcctcagtctctggtgcgaggagacgagacgtctctttacgcggcggcaagccgaatagccaatgcggtattcggtgcagcaaccatcgcaatagccagccgaacctatgcgataggccgcgcggcataaaccatcagccggtaaaactgcgatacagttgagaccagttcaaccagctgcatgaaggagtgccggcgatgatgttgtctcataatccgatagtcgaaccatttgcattggcccacgccaccatcgtcaccggagataaagccggaaccatactgcgtaacatgacgatcgtggtcggagccgacggacgtatcgaacaggttgcacccagcatcgaaaccagtatcccagccgaataccactatcttgacggcaccggcaaaatcgtgatgccggggctgatcaatgcgcatacccatctgttctcccaaggcaagccgctcaatccgaagctggcgacgcccaaaggccaacgtatggtcgccacattcgcgcattcgccattgggcaagccgtacatggccgcaaccgtaagacacaacgccacaacattgctggaatccggcgttacgacgatccgcacgcttggcgacgtgggatatgaagtcgtgacattacgcgatcagattgatgcaggccaaatcctcggaccgcgtatcttggcgtccggaccgctgatggcgattcccgaaggccatggcgccccgcttatcgcactgaccagcggcaccccggaagaggcgcgtaccgcagtcgcgcagaatctcaaggctggcgtcaacgccatcaaaatcgccgcgaccggcggcgtaaccgatgcacaggaaatcggcgaggccggcagcccgcagatgagcgtggaacagatgcgggcgatttgcgatgaggcgcatcagtatggtgttattgtcggcgcgcacgcgcaaagcccggaaggcgtgcggcgttcgctgctggccggcgtcgataccatcgaacacggcagcgtgctcgacgacgaattgatcggcatgttccggcacaatccgaatgcgttgcgcggatactcggcattgattccgacactgtccgccggccttcccctgaccttgcttggacaggacgcgaccggcatcaccgacatccaattggagaattccaagaatgtggtcggcggcatggtttcaggtgcccgtcaagcgcacgaggccggattgatgataggcgtcggcaccgatacaggcatgacattcgtgccgcagtacgccacgtggcgtgagctggagctgctggtcgcatacgccggtttcagtccggctgaggccctgcacgcagtcactgccgtcaacgcctccattctcggcgtcgatgccgagaccggttctttggaagtcggcaaatccgctgatttgcttgtgctgaatgccaatccgctggacgacctgcgcgcgttggaacacccggcattggtcatcgcggccggtcacccggtatggcgtcccgctcccaagcgtttcgcggatatcgacgccctgttggatgaggcatacgcctaatcgcggagtgctgccgggccgttatgccggcaggtcattgtccaacctgtgtggcgagatgggggcatggcgaaaacagcagcgaacgtaccggtaaccgtggtgcccggaggcgactcgtatttgaacgacgcgcgcaccaaggcactgtgcgcacaagcgttgaaggcgcgacccgacgtcgaactcatcgagctcgacgccacatcggccgaccaatatgccttcgatgaagccgtcagcccatcgttgctttccgacgttgccgtggtcaaactcgtcaacctgcagaatgccgacgaaaagctcgccgaagctttggtgacgtacaccaagcaggccgccaaggatccgaacggctccagcgtggtgatctgccagcacgagggcggcgtcaaagggcgcaagatcatcgaccaactggtgaaagccggcgctcgcaaagaggacgtgccggatttgaagaaaccggatgcccaactcaatttcgtactcggagaattcgagaaacgcggtcgtagagtcgaaccgatggccgcgcagcagctggtatccgtgctcggcggcaaaaccggcgaactcgccgccatgtgcgagcaattgtgtttcgactttgacgataatccgatggggctcgaccgtgtcaaccagtatttgaccgccaatccgcaggtcaccggttttgccgtggcagacaaggccgtggaaggcaaaaccgcagaagccatcgtcatgatgcgtgcagctgtggaacaagggaccgatcccatcgcgttgatcggcgcgttggccatgaagctccgtaccattgccaaagcctcggcggtccgggccggcacgatttcacaggccgaagcgaaaaccaatccgtgggtgctgaagaatgcgatgcgccaacttggcggctggacttcggcaggactcgcgcattgcatccgtatgctcgcctgggcggatgagcaaagcaaaacgaacggcggcgacccggtatatgcgctggaacgctgcattgaagacatcagtcataaaggtcggtaaaagtcgataaaggggtatttatgagcgaacacactattgcggctcccaccagcgaggccatgcaggagctcggccgccgcgtggccggaatggtacacggcggcgatgtattgctgctctcaggccctcttggtgccggcaaaaccacattcgcccagggcttcggcgcggggctggacattaccgaacccatcgtgtctcctacattcaccattgcccgcgaacttgacgggcatttcgccgacggcactccggctcatctggtgcatgtggatgcctaccgtctgggcggctcagcctatgcgccggggcaggacgccatcgggcgtttgttggacgagctggaatcgctgggattggacgaagaacttgaagaccccggcgagaacacggtggtgcttatggagtggggcgaacaaatggccaccgccttggcaccagaacgacttgaaatccatatcgatcgacctctcgattcctccgatgtcgcatccgctggatcagacggcgaactcaccagcaacggcactcgtaccgtcgcattcgtcccagtcggcaagcgatgggccgcgttcgacctgcaataagccatgcgcccatagactcctcgatgtacactctctagaggctttacgactaggaggattcatgggttgcacgttggtgattgacacctcattcggttcgacggtcggcattgtggggcgcgagcccattgtggagaccgattcgcgcacccatgtggagaaactgcaggtcaatatcgcgcgcgcggtcgaggaggccggcctgactcctgccgatatcgaggagatcgtcgtgggcatcggcccggcgccattcaccggcctgcgcgccggcatcgtggccgccaaggcgttggccttcgccaccggggccaagctcgtcggacagaacgtactcgacccgcaaggcgagatgatgagcttcgtgctgggtgacagcgccatgttcgacggcatcgatttcctggccgacgtgccgcgcttgagttcgcgccaatcggatggtgacgtcccggacgccgaggccaaggaacacgaactcgaccgccacgtcacgctgtgcgtcaacgatgctcgccgcaagcagctgtacttctcgctcaaccacggcagcatcagcctgccggacgaggacgccgccgaacgacgctggatcgagatggatatcgactacccggagcatatcgtcgaacgggtgaacgcggcgctcgcggaacacggcgaacgcgacggcgtcagctatgtggtggatgtggccggccacggcgcggccaaatacgcgtccgtctggcagggactgcgtgcgctgggctccgtggtggacggatcggtattggatgccgggaaagccgggctcgccgtctttgcgaccaccgcgttgagctgcgaactgcgcggcgaccaggttgtgccgatcgaaccgttgtacctgcgccggccggacgccgaagtgccgaacccgctgaagcacgtgctcggccatgccggtgccgataaagcgtgaggcgggttgtgtccgatgattgttgatatcactgctgtgagtcgtgatcttgcggttcgttccattgcacagttggaaggcgaactgttcggccgcggcgcatggaatgcgaacatggtgcgagaggaactggacgcaccggcccgcacgtatctgctggatgtgctgggggaggcggaacaggcggttgtccgcggctacgccggcttctggtatgacggcgaggacgccgagctcatgaccatcggcgtgggcaaggcataccagcggcaaggcatcgccgctgcgttgcttcaggcactggtcgacgaggcgaaacgtcagggcgcctcgcgcatgctgctcgaagtgcgtgtggataacgaccctgcgctggccctatatcagcggttcggattcgaacgcatgggattgcgcaaacgctactaccagcccgaaggcatcgacgcatacaccatgagcttggacctgaagccgagggtcgtgggctttgccgccccgcagacggcatcggcggacattgaagacatcaccagcaagcaaacggagaagaacggagaagcacgatgagcgaaccggttgtactgggtattgaatccacctgcgacgaaaccgcagccgccatcgtacgcggccgcgaactgctctccaacgtcgtggcctcatccatggaggaacacgcgcgatacggcggcgtgatccccgaaatcgcctcccgcgcgcacgccgaggccttcgtgccatgcgtgtccaaggcgctcgtcgacgcgaacatgacgttggcggatgtggacgccatcgccgtgtccgccggtcccggactggccggttgcctggccgtgggcgtgtccggcgccaaggcgctggcctgggctgcgaacaagccgatctacggcatcaaccatgtgatcgggcacatcgccgtcactcagctgcagttcggcccgttccccaaggacacgctggctctgatcgtctccggcggccacacctcgctgctgcacgtggaagacatgccgcgcaaaatcgatgtggtgggcaccacgctggatgacgcggcgggggagtgcttcgacaaggtcgcccgcctgctcggcttcccgtatccgggcggcccgcacatcgaccgccacggccagaacggcgacccgcacgccatcaaggtgccgatgggcctgacacaaggcaaggccggtgccgcgcacccgtatgatttcagtttctccggtgtcaagaccgccgtggctcgctgggtggaaagcgagcaggccgccggccatgagattccggtggacgacgtgtgcgcctccctggccgattccgtggccaccgtgctggcccgtaaggccatgcgcggctgccggcagtacgattccaacacgctgatcgtgggcggcggcttctccgccaactcgcagctgcgcgccaaactgctcgaattcggcgagaagtacggcgtcgacgtccgtatcccgcaaatcaagctctgcaccgacaacggtgccatggtcgccatgctcggcgtgaacctggtcgaagccggcgtggcccccagcgcccccgacttcccgattgactccgccatgcccctgaccaaggtttcgatgtaagatttgcgcggtattcccaaactgatactgggaataccgtgcctctcatcggtgaattgacagtgacctgtctgcctgatgtgagtagtggtgaggtcttcgccatggatttcccggttgatgatggggtgtcgtgtctggtcaccaatgcgatgaaaataaaaaagcctcggagaaccgaggctttcgatggctcctgcggctgggcttgaaccagcgaccgtccgattaacagtcggatgctctgccaactgagctacgcaggaatattcaattttcatcccgtccggagttacccgttcaggtgagctcctgcggctgggcttgaaccagcgaccgtccgatatacggttctggctcgcagccgtagggctttttgcaacaggagtagacaatacaccagccttgctgttccttcaaatcggcgtgtcatcgcgcatgttcgccttgcagctggttttccgaagagcatcggccagaaacgcgcaatagtattccttgggaagtgatgaagaagtcacttcccttttctatgcgcttaaggagccccatgaggtattggaacgacaacaggaagagctgcgaacacgtcgagccacgggaggattggaaagaatccattgagaaatggatcgactggatggacgccatcggacgcacgaacgacaccctgcgcacccgctggtaccagatcgttcgattctccaaagccgtcgataaaagcatcaccgacgtgaccgaagacgacctcatattctacctagccggcatgggaaccgaaggcagacgcggagtacgcagctgcgtcaaggtcttctaccaatggagcatgaagcgagggctcgcccgccgcaatccggcggacgaagtgcccaccgtgcccatgacccttccgtccggctgcatctgtcccgaggagaacatcgaacaaggactcgcatcacccgacgagaacgcgcggctggccgtcatgctgggcgcgttctgcggcctgcgccgcatcgaaatgaccagaatcaacctgaagaccgatctggaggagaacgccgagggcatggtgctccacgtccacggcaagggcaacaaggagcggatgcttcccgtgccggcaaagctcgcttcggcattgcggaaacgcaccggcgtatggctgttccccggagacgtgcagggacactgcggcgtcgattacgtggcgaagaggatcaagacggtaaccggatacccgtcgcacagcctgcgccgtaggttcgccacatgcgtctactacaggaacggctgcaacatcgtgcttgtcagccgtatgctggggcacgccaacatcgccaccaccatgcgttacatcggcctcgtgcaggacgaaatgcgcaacgccgtggaatccaccacccgcaccgacatgagactgaccatgcccatgaaccaggtcgtcggaacagccggcagcgtcgccacctattcccttagcaccgcgaggatcggatgaacaaacggtatacgccaacatgcttctttgcgcatattggcgtataccaacaccgctcaccgagtgttcccgagactggaaagcggcaacgcggctatgtctatccccagcgcatcggctgcggagaacaccgcttcaatcggggcttcgccccgctggagcagagcatcggcaaaccggggatcgataccggcctgggaggcaaggtcgtcggcgttccaggaatggttcgcggtctcttcacggaaggcggctgcgatatccgattcggtgcgggcgaaaagagtccggcgttcacgcggcgcttggaaacggctgaggtaacgcgcgtactccaattgcgcctttgtcggctcaggcaagttatagtccagattcgacatcgcagacctccttagcgttcagcgggttggactggagtcgttcgacgcaccgaaaatagggaatccgggaaccgcatcggccgacgatggagtgcctggagtgccgtacaacgtcccgatctgttcgatcgcccatgcgctccaacgtggggattcgaccgtggatgtcatcaggccggcggggaggaaccggcgcatctcgtcggcgaaggcatccgagccgatcacatcggcgacccccgccacgcgatcagcacggtctgcccaaagtccttcttcgccgtaatcagatgatttcaattccgcaagctccatcgcccgtcgggaatcgacgtcgcctctcgacgccaaccagcacatgtcccacaggtcgcgtcgccgcaggtgcgatgcgcaggcataggagagcagcttgtcggcaagaatctcggtggggctttccacatcgaggatgatctgacccgacaaggccgggaacatcggatagttgaccaaggcgggacgatgctgcggctcgtacgcgggaatcgatgccacctccagcttgattgtctggctcggcagatccttgcgctgaccggccgtgcgaatcgctatacgccatctgcgcgtcagcccatcggcgtcgggtctcggctccttgacccggaccgtcacatcatcgcccatccccgagagcgaatcggagatgcaggagccaagccctttaagggtgtccatgtcgaacgaggtgccgccggcaaaatcaaggtcctcgctgtaccttggggacccgtggcacaggcgcagactcgtgccgccctggaacaccagcgaggagaagaaaccctcgcgcatcatggcatccaggattcgataatgcagaagttccttctcgaccacgggaagcagattgcccatgccctcgcccccggccaagacgatcccggccgccatagccttgtagtcataggtgccgtcagctccagtcatcatcgtcctccaattcgtccatgtccaccagatcgaggttgcgtccgacggccttcaggtcacgatacgcccactgtttcgacgcgagcggcgtcagtccgtcatcgcgggcgatcaggttcggcaggatgcgactccagctgagcttgcagtgcgtgaactcgatcaccccgtacgcggtgcggaactcgccctcacggcccgtggtcatgaacgtgaccctatccaccggaatctggctgatcacgttccagcgcgacagagcgctttcgaggctttcccacaccagctcgccggaacgcaaccgctttgcgacctgatgaagtgtcccctcgccgagatgggaggaatacgcgaacacgtagacgccacgggcggcacggaccaacgccttcgccgataccaggctggacagggttcggttcagtttctgcccctgctcacccagcacgacggccagttcgttcttgcaatacacgtagcacgagtacttggcatccatctcgcgcagctgatcaatcgcctcgctcctcttcatgcatataagtgtacatgaatatatgtaaaaacgcatattcatgtacacctatcacaatcctgaagcgttccaatcagagggaacgccctcgtgccggaccgtcttcgagaccaatcccgtcgatggcgttttccgagaaagggttctctcttaatctgccgacgatttccgctacggcgcgctcttcctgatcaacgcattggacaagctgggaaatgaacggcttgggatcgccgtcaacctgccatgcttccagacttttcccatagctgcggccggcatcatgtttgattgctacgggccggtagccggcagccatgagcatgagattcagaatctgtcgcccggttcgcccgttgccgtccgtgaatggatggatgttctcgaacatcgcgtggaatccggcagctttgaggatcgggtggtctttggaaccgttcaccgcgtccacgagcgcttccatgtcctcgtagatttcaagtgggtcggcggtcttcactcgggtggcggtgatccttgcctggtagccgtaggggcggaaccgacccctgagcgcgggctgcatgtccaatgcggtgacttcatgcagcttttggatcatctcgacactcagcgtccgctcctcttcagcgaatcgttccgcataggccatgccatccgcaacgccacgggcggcgaagatgtatcttgccggcgagtcggtcggcacgaactcgccctccaacaccagttcggtgtcctcaagcgtcagcgtggatccctcgatcgcgttggagttgtagacatagcgggccatccattccttacggtaatcctcaagcgctgactgctccaccccatccaaaggaaacatctgcctgaaccgttctcgggcagcatcggaacgacgaagcaagtcggacacctccgcgtcccgctccagagagtccaagagaggaggaaggtttcggattttctcagtcagcgctggattcggcatatcggctccttaatcgatgcttccataagtctacaagcgcaggcgcgtcacatggacagtcctggcgtatctctacctccacactgccgtcgtggtggtggccgcgcatcttcaggattccgttctcgtcccagatgtggtcgatctcgcagtccttgaacggggaatcatcgccgttcatcagatcatcgaaggtctcgaacgaggatatgcccgtgcgttcgccgtcccatcggcctatgcttccgaacgcgatcagcgggttgcctcccatcgggttcctgtacgaggagagcgccgactgggatccattgaagaaatcacgcagagcgccggtctccatcctgtaatcggtttgacgggattcgtccgcgaaggcatcgaacgtgatcgacgtgccgctctcctcgtacagccgccacaggctgtcggcgcgggtgctgtgttcacggtaatacgggtccccgtgtcgcgtgtcgtagtcggcggcgttgtagatgggcctcttgaggggttccgggtcgcgtatctcgtccgtccaattcatgtccatcatgtgctccttcgctttatcgtccgtgtgtcgtttccatgccgtcatccaacgcgaggtcgagccctgcggtctcaggagacgtttcctgtgggtcggcccagccgacggcgaggtccagcgcgccgcgcaacgcctggccggaaagccggtacgtccaggaatcgtttgcctcgtaagggaaggattcgccggacacgatgccgcgctcgtcatgcaggctcacgtcgaacgttccgggtttggccgtgattagcgcatgacgggcggaaccgggagccgagacctccagcgcctttctgccgtcgggagacccggtggcggtgaatttgatatcggggtggtgcgcgaggctgtaggaagcgttggactcacacgccagcgggaccgtatctcccagcccgctgtctgcggccagctgctgtgggctgtaatccatgccctgcgtgtagtcgatgggctgcgcgtcggtgtagaagcatccgccgccatcgtccgcgtcgatcaggtcgcccacgagccggtccaggcgtgcggggtcgtcccatgcgctcacgagtctggcgggttcggcctggttcttccatgccatgtagcggtcgcgttggtcgccgcagatgccgtcgaatgattcctgggagatgaacgtgccgccgtccaattggtagcattccccgtccgggtccaacgcgcgctccttgaactccttttcggcggcggcgtacaggcgcttgtcgagcggttccatggccgcgtcgatgcccgccatcatctcgtccacgtgttgccgcatgtcgggctggctcgttttccaccatgcctgcaagtcggcgagcacgtcggcggcgttctcccgttcgcacacgtcgagcaggtcatcgtcgtaattttccaccgtccaggagtagaaatcccagtcactcgaaccggtcaggcgttcgatgcccttcatgcggtggaagtccatcaacccgccgccgtgctcgcgcacgatgcccgccaacggcagatcggcctcgtccatcaggcctttccagtattcggggacattcccgttctccatgtcgttctcctttccgaacgccttttcgatcacgagcgggtctcgtgggtcaacagtgcggtcgatccgcagtatctcgggcatgaccgcctcgctttcacggccgatgacgaacgtgccgataccggccttgacgcgatgctcgggaagccttcccgaaccgtcgcacatcaccgccggccggaacagcgaatccccgtaggcgagcgtcaccgtgtcgcccggcctggcgagaacccgttcgacggccatgcgtgagaggccgtgcgcgtcgagacggccggaacgccaatcgttggcctcggctgctgtcagggtgaaggaaacggaacgcccttcctgggccgaggtcacgtcgagcctgactggctgcatggcctcgaaaccgatccagatgccttccggcgtcctgtccggggctttcacgtcaatgtccgtgaacccgtattcggtcagcacgtccgtgaccctgatcctgagcgcgttgtcgggaggcagatcagggcgttcattgggaatcgggagcgaggacgcctcgaaccacacgtcctcgctcggatcggtgtcgaagccgccgtccgcgtcggaatacgccatgtggacgccgaactccaattccttggcatcgacggaagagaccagaatcgcgttccccagcacgagatcgcgcgcgttcctgcgcaggatggattgcatgtcgggcttggcgggattcccggccgcgagcaggtcgcggttcacaccctccatgtcaaaaggcgtcaaggccatctcgctcgccctttctcacttggaaaggccggaaccggccgtatcggtcatattcagcgggtccgaggggtcgcacgcctgcgcgcgttccgcgaacgaggtgacggcaccgggcagcacatatcccagatcaaggtcgatcgggctcacgccgtcgtcttcgccgacggacgctgcgggcattgcgcccatggtctcgcgcagcacgtccacggcgtcgccagtagcggcgcgcgcgtcgatgatccggtgcatcgtgtcctcaagcgcggcatggatatcggtggaaccctcctccacgatgcactggtatgagggggctccccagttcgtgccggtgccggaaatcgtgtagtccgcgatgcgttcgcccggctggacgagcgaggcgaggtcgaacgcggccggcgaaccggtcttcgcgtcgaaatcatccagccattcgacctcctcggcgatctcctcgcgcgagtaccggccgtcgatatcgctcggccagtccgcgtcctccagatagccgttgtcgccaagcgacacatcgccgtcgagcttgaggtcccggccgtacatctccatatcgatcagatagccgagccccgtatcgaacatggaccacacggcatccgatgcccacccatggttcacggcggtccaggcatacttcgcctccttcgattcggccgaggacggcgcatcataagagtgataggggatctcgtccgagttcaacgcgaggttcgcgtactgcaacggggtgcgcgggaccgcgtcaagatcgtcgcggaccgcccgcaccttctcgtacacgtccgggtcgtcgtcctcgcgcgcctcgaacgcgcggcacatgaggttcaggtccgtcagcgactcgtattcgccgggattcgccacggtggcgagcagtccttccccgccctcgtagtcgtggatcgcgtactcctcgtaccggccgcccaatcccacctcggtcttcagggtgtcctgcaagcgttcggcgggcatgggcagcgtgatccacgcgccctgcaacacgccctccacgtatttgcccaggttggcgacgtacacgctgatctggtagtccttcaatccgtccatgatgatgctccttcgctcgggtcttttatcgtgtggctgcggccgaggcagacgtatcggcaatgctcaacgggtcggccgggttcgcgggatcgtaggtttcggacgtttcggccttctcgccttcgtctttgcgggcgagccggccgtcgtccaccatcgcgtcgatgatctcccatccctcctcgatgctgcggtcccgcaattccctggccgagatcatgtcgcgcatcgcgtccatgttctcgttgttgtcgggccagtcatggtctttcagccagtgccgaaggtcctcctccgtccagcggatctccgcaatcgtttcgttgccttgcccggcgttgctttgaccgggatgaagcaacgcctcagatcggagaccgaaatacgctttgtcttcctggaggccggacaggaagccggagggcgtgaacccgttgcgtgccgcgaactcgcgggaccagcattcgtcgaactcctcgtcggggtcgaagtcgaggagcccgtccgccatggcgcgcctcagccccttctcgtccgcctcggccggcaccgtgaccgtgaccgtggcgtggttgggggcctccagcgtcatgtacagttcgctgtggccggcgtcgcgttggatgaagcattccccgttgccccagtcgagctcgtgctgctcgatcagctccttcgccttgtcggtcagggcccgttcctgggacgtgtattcatcgggttccatcagcatgatgcgtccttccttcccttggatgatcggtgccgcgccgtccggcgggcatggctccgatcatcagcccatacgggcggtcgcgcggggcatggcgtctacggggcagatgattccgccgagatctgatgctcggtcccttcacgtgtcccgctcctcagtaccagttgtgggcgagccagaacgtcttggcggcgctggggctgccgtaccgtccggcgatgtagttcaatccccatttgatctgggtggcggcgtcgtccttccagtcgtctcctgcggaggcgagtttcgacgcgggcaacgcctggggtatgccgtacgcgccgctgctcgggttggtggcattccactgccatcccgattccttgttccacagccatacgagcgcgtcatagtcgccgtcgccccagtccttgtacgaggcgatcatcttcctggcgatggcccgggcctgttccggcgtggcgtgggtgccgtcgccgtcgtagtccaccaccacgtccgtggagcccgagtcggaactggagcacgtccatgccgcctccaccggatccgaagaggaggacgacgagtcggacgatgacgacgaatcggacgattcggaaccggatgacgtggaatccgtgccggcggaaccattggtggacacactgccgttgggcaggatgtagaccgcgccgacgtcgatcctgtgcgtgcggtggttgacgatgcccaggccgccgcgcccgttcatctcgctgatggtcacggtgccggccgtccggtcgaccgcctcgacgacggcgacgtggccgtacagggtgtccgcgtcggccacgccgggcgggtagctgacgatgctgccggccacgggatcggtgcgggtggtcttccatccggcggcggtggcgctggcggcccagtcgccgccgttgccccagtaggagcccacgtccaatccgattttatggcctctcatgcacgcccaccatgtgcattgcccgtccggataggcctggcacacgttgtcgggcccgtcggatccgttgaaccacgccttggtctgcgcgatggtcatgccgtcacgcacctcgccggtcgtgacgcttcccgtgacgcctcccgacgatccgttggagccgccgtccttgcagccgccgaggaccgcgagcacggtcaacggcgtgcatccgccgagcagggacagcaggcacgccgagagcatggccgcgaggatccgatggcggctggcccggctcattgcgtgttcctcagcgaccagaagggcttctgcccgccgaccacgacctccacggtccggcagggatgctggaccgtgccgtatccggtggcggagatcaccgtgtacgcctcgtcgccggccttcacctgatcggggtcgagctcgttggcatccttgtccagcaatgacgcgtcgagcgcggccgggcagtagacggtgacgtgccagttgccgtcgtccatcggcaagagcacggtgttgtacgcctggctgacggtctgctgcggatccgtcgtggatgacggtccgccgccttccgggatcgggaagctggtttccttcgtcgtccagaacggctgggactggatggcatccgtatccgagccctcccatttgccgtcggaggtgcaggtgtaggcgtagttgacgtacttgtcatcgtattggcccgagcatacggatccggcgtggaagcggcgctgggtccaccaccagcgcggcgcgtcggagaccggatggctctccccggcaccgtcgtcgccgagcagcgcgaacacgttcttgcgccattcgtcgtcgctgccgtttggatcgagcagcgcgtccaccgtttccaatgcggtgtcgatcgggccggaaccattatgcagcgtgatgccgtccgcgttttcggagagcgtgcgggtgccgtccttgtgggtgtcaacggggaacgcggtggtgcgctgagaccagtcgccgggaaccgggattcccgccgcctccaggccggcgtaccgtcgcgggcccgaatccgttttccttttgcccgtggactcctgtttcgcgtccgtcgcggaaccgtggtcgtcgccggccgttgacggctggtggttggcgacgatgacgcccagcgagcacacgaggagcgcggcgacgaacaggcacaggacgcgcagcggtttcggcagcggacgcggttccggccggttcacgattcaccgccttcccaacggttcggctcacccggcatgccgccttgcgtgttttcttccatggccggatgctcccgctcggggttcacggttcccggatccgcgttttcgggcgacccgtcttccgccgacccgtcttccgtccccgtccaccgcgcgtctatgaggtcgtccgccgttttcagttcggcgctggtgtttcccgcgtccttcgccttcctgcgcagcagggtggccttctcgcgggcctcttccagacgtccctccaatgatttgatgttgacgcgcgccgccacgtactcgtccatcgcatcctgtttcgtcctctggctgtcgcgcaccgccttgaggatgctgcgtttcatgtcgcgcatggtgttctggttgttcgccacgacgatcttcctttcgctcgtttttccgtcaaggcgagtctgccttcccgtcgcgcgttccacggggcatggcgtctacattccccatggcggaaggcggggcgtgtagacgccgtgccccgtggccggccgttttgcggccgagaatcggaagcgtcgttccaatcaggtgaaaggaaaatcaatggaatcgtttctctctatgctcgccggctggttcatgggcctgtggacgtggctggtcgagctcaacgggatgctccaggtggtgctcgtgctgctgtgcgtggtcgcctcgggcgtgtgcgcgatcatcggcaaacgcatgggcagcccgatgatcgtggaatccggcggacagacctggagccgcacgctggtgacggccatcgcgtggatcgccggcgtcatcctcatgctgatcgcggtgctggccatcgccgccgtgttcgcgccgctgctcggcttcgccgcctgaccttggcgacgcctttccatccagggccggccgggaagggattcccgcgccggtcctcgcatgtcggacaagaatcaaggaatcccaaaaaacggaaggaacgcgaacgaagaatgaagctcgtcatcgcggaaaagaaatcggtcgccacggccatcgcgcaggcgttgtgcgccgcgcccgtccaaagggacggatgctatgagtgcggccagctgctcgtgacatgggcgcagggccacctgatcgaccttgccatgcccgaggactacaaggacagggattggaggaaatggagtctggacacgctgcctgtggacccgtccggccattggcagtggaagatcagcgaggagcgcggtgccggctcccgctaccggcagatcgtgcggctgatccgccgaacggatgtggattgcctcgtcaacgcctgcgaccccgaccgcgagggtgaggccatcttccgccgcatcgcggacatggaaggctctcacaagccggaactgcgcctgtgggtggcgagcctggaggcggaggccatccaggccgcgtggcgggcgatgaaacccgaatccgaataccaagggctcgcatggtcggcggagatcaggtcgaaggcggactggctgatcggcatgaacgcgagccgcgcgtactcgctgctctacaacgcacggttcagcgtgggccgcgtgcagacgccgacgctcgccatgatcgcggaacgcgaccggcagatcaggaaccacaaaccggtgccgttctggaccgtgatcgcggacatgggcggatggcggctctccagcgaacggatcgacagcaaggatgcggcgatgctgctgtgcggccaggtcgaacgcggccgcttccgcatcatgtccgtgaaccggaggcgggtgaacgaccggccgccccgcctgtatgacctgaccggattgcagaaggacatgagccggttgcacggcatgaccgccgcacgcacgctccaggcgttgcagcacctctacgaactcaaactcgccacctatccgcgcaccgacagccggtacatcacgcacgacgacctcgaaacgctcacggcgctcctcgaatccggccgtctcgcccacgggttcgtcacccgcgagggcatacccggacacccgcgcccggagctggccgtcaatgacgcgaaggtggccggccacaccgcgatactgccgaccatgcaattggacgccgggaagctggaaggcctggacgatgacgagcgcaaggtgatgacacgcatcgtgcgccgcatgtgggaggccgtgggcgacgaccatgtgcacatcgtcaccgaggtgaaggcccggctttccgacgacaccgacagggagttctccagtcgttccgacgagaccgtatccgcaggatggaaggccgtcgaaaccggccacgggcccgaaccggaagacgaggaaaccgcgaacccggcgggaggaaggaacgtgatcccatcgaacctcacggaaggcggcgtcattcgcccggtcgggaaggtcacggtcgaggaaggcgagacccgcccgcccaaaccgttcaccgaggccacgctgctggccgcgatggagcacgcgagccggtacgtggaggacaaaagcctcaaggcggcgctcgatgacgacgaatcacattccggcggcatcggcacgccagccacccgcgcggacaccatcgaaaaactcgtgcgctccaaactcgtggaacgcaagggccgtcagctccacgccaccacggaaggcgaacgcctcaccgacgtggtggagccacgactgaaggacgtgctgctcaccgcacggatggaacaggcgttgtccgacgtggaacacggcaaacgaggcccgtctgaggtgatggacatgttccaccgggaggcattgcgaatccccgccgacgcgaccgcgaacctcaaggccgatgccgtcacacgaaccgcgaacaccgacgcgcaggaatggggcgactgcccgcgctgcggccagccggtgaggaaaaccggccggatgtggcagtgctccacgaacagaagcgagaagaccaaggacggcaagtggatcgccgtcgagggatgcggctggaagatgtacgcgagcctcgcgggcaagaccatcaccgaccagaccgcacgcaggctcctcgcgggacagaccgtcacgctgaagggcttcacatccaaatccgggaagaagttcgacgcggccatccgcatcgacaagttacgcggcacggcgttcgacttcgaccgctgaccaaccggccaaccatccgtgcccgacgcgccatgccgcgccgggcacggcaacgaccaaggagacgatgaaaccatgcgacgatacagccacgccttccgggtcctcatggaccgggagctgttcaatctgcttgccgaggcctccgccaagacgggcatacccaaatcccgtttcgtgagatacgccatccagccgttcagctacacggaactcgcccccggcaccaccgattggaacgacgtgtaccgcaccgaccccgaccccgaacatccgctgaagcagggacgccagctcaatgtcatgctcaccggcgacgaatacgagatgctgtgccgggccgcattcaagctgggcatcgcgcgcagcgcctgggtgcgggaacgggtgtacgcgctcctctgccgctcctatgcggacgagctctccccgctcacggacgcgagcatccgcgacaacgcgacgatgctgctcaaggagctcaagacgaaggatgcgggaagatgacattccaaaaaaaggaagagccccttcccattcgtggaagaaggcatcaccccgaacgatcatccaccctcatgcgttttcctatgcgctcatatggatatgtccatggacacccacatggacacgtctatggacacccacatggatatgtccatggacatccacatggagatgcccatcaaatcgaaggtaagcaagctagacggttcatgtacatgaaccgagcccgcagcctcccgcgccctacggcgctgaagcaacaacccgagtgccgaaggccaatgaggaaggaatcggaataatgcgaaagaggagcagcaaaggagggggcgagcagcgctccatccaggtgcatctcatggtgaacgaggaggaagccgggatgatccgcaccgccgccaagaaaaggaaccagacggtctccctcaccatcatcgaggctgtgaaactgttggaggggagactgcaagtcaaggaggaggaacgcgattcgcccaccgtccaggcgctcaaggagatcgaataccagctgcgccgcatcggccgcaacgtcaaccagatcgcgcacaacgcgaacagggagatgaacgcgaccatcgaggacgaggcatcggcgtcctacgccgtccggcaatgccgggaactaatcgaccatcttgataccgtcatcgaacgatccgggaacgattgacggcgagaacgaggaccttcccggactgtgagccgcgtggagtcctcagtgcaggagaccggggtttcccccaaggccagggaacgggatccccggaacgatgtcggtcgcaagggtgtcgttcccgacggtggcggtggaggtttccgcttctttgagtgccatccggtatgcgggtccgagcacgtacttgcggcgggcgtccagcgtggccttatagaaatcacgttgaaggtcatcgagtccgggggtctgctccacgatgcggtccgtgacctcctcggacaggcgcggccagagttccggcagctccgccctgaaggggcgtgcggtctccgaggtcaggaagaaggcgaacttgcgtcgcttgccgccgacgttcatcgccatgtagggtgcggccatgttcgcctcacgcatttgctgaggatcctcgacccgttccctcatgccttcacgggacaggctcggggacagtgacgaaccgcagtcgtatacgggggcgagatcaagaatatccgcggtccttctgtccgctatgaacccccagttgttcgcgtggcggtcgaagttccctatcagcgcatcgacgcatgtcatctgaaggaagcggtgccgcgcccgcgcgcggatgccttcgagcgcgtcatgttcgtcaaggacctggctgacgaactcccaatcgggcctggccttcgatcggctgcttccaccgggcatgctgatttccagctgcttgaaatgaagcagcatgaggttcggatccatctcgtacatgaaatcacggcacgccaccacggaacggcccttgtaatcaccgagaatgacatcctgcgtggggatgcccgaagcggcgaacaccttggagccgatatactcgttgacgggcaggttgacgtagctggtacgactgggatgctcctcctgcggggcggcgtcatacccgaacttgaccatgtagaggtggccgtccatcagcatggttcgcttttcggcggccccgtcatacacgctgaccttcaactcatacggcgagaaatcacgcacccgttccatgcttcgccgcccatccgtcatgcaggtagtactcgcgtaccatcatctcctgatcctcgttctccatctcgcggctgcatccgtccacggcgtcgtagtagatgctcagagtcgagtccgacacgtcccggtgcagcgcgtcgatcagctcgtctatgctctccgccgtgatctgcgggatggggaaaggccagtcctgtggccgtctgatcatcgaaacatccatcgtggctccttgcttttccgtcaattctacttcaggaacggcgtcgccgccgtcgccgaaccgtcggcgaaatcagggaggactcccgtcgggccgtcagagaagggtcaggctttgaggacggcccgcctgaagtccctggacctcctcgatgaaccgggagaacgtcatggtctccccctggataaggtcgtcgtatgattccttgaccaccttgggcatgaccaggtggatgtgcagttcatcgagttgggcgagcttgggatgggtcacgtcgccgggagtcagggtgaacaggtgcttgtccctgatcctgttggcttcgtcggcgacctggcggaaacgatccttgatggaggttttcgaggcgagcatacgcagctgttcctcggggaacgccggatcctcgtaggcggcttgcgagggaaacaggaaatcgggtttcttcccgttttctgtcctggcctgggcctcgtattcgatgccgcgcgcgtcgaggatgtgggcgatgtggatttcgaggaccttgcctgcgcggctcatgcgccggttgcgcacggaggtgtagaacgaagtgaacgagtcaacgtcgatgacgccatccgatacgaatggcgtggcatcgtagtcgtgttggatgaccgcccgctcatagagtttgaacagcaggtagctgcggtcgtagtattcgatcaccacgtcgtcagggtcatcgtgcgtggggtccacgtccgtcaaggaggattgggagaaggccgcgaactcctcgttgctggggaacctgtatccccatctgccgatcatctcggggagatacgtgtcatcccgcacttcgacgttgatgccgagagcttcgaagatctgcgcgccgaaggcgtccagctcacgttccgtgttgtcgtggaagcggaacgcgccctcctgttcgtcgtcgatgccgaagagccatttggcttgggcttcggccgtgctgtcatgctgtgcgatgatgatcagcaggcgattgtccctgagcataccgaagcacatgaggtcgccggggcgggccatgcggattggctcgcagtccttgtagtagagacgccattcggcgctgcggttcgggttgttgcgccgcgcgtcgtaccatgtggtttcgaggtcggcgaccgccggtgcgtcatcgtcgctcaggtacatgagcgcggtgggtatgccgtgcccttgtgaggctctacgatcctcgccggtgccgagcagtcttctgagcgcgtcgttgccgccgaactcgtgctggttgctgctgttggcgtcgatatcgacggccgacagtttcttggccgcgaccgggccgatgtagtcgccgattcttccgtaatcgctcataatccatgagcatagaccaatcggacaggaaacgcctcgggcgaatcagtcggacaggtagggtttcatcgcctcgcctatggctcggatgaccggcactgcgaccgagttgccgaactgccggtatgcctgcgtgtctgataccgggatactgaacgaatccgggtagcccatcagtcgcgcgcattcgcgcggggttagccttcgagggttctttccctcgccgcgtgagaccagtatctcgctgccgtcctttccgtaccgcgcgctcaacgtgcgcgtgtggtcggtggcggcatcgaccatgccatatccgaaaccgttgcctgcggcctcgtgcttcttcttgtagttctggaggtacgtccacagcttgtcgctcagaacatacttgtcgggaacctgggaggcgggcaggaggatgctgccgacgttgccgtgcgcgatgggcttcacgtcatcgaacgtgaacccgttctcctcgcggaagcccacgatgtacgtgcgttccctgtgctgggggacgaagcccgccgcgtcgatcagcttgtaggtgacgtggtatccaaggtcttcggtcagcacggaatatatcgtcttgaacgtgcgcccacggtcgtgcgagagcaggttcttcacgttctccaggaggaacgccttcggctgcttcgccttgatgattctcgccacgtcgaagaacagtgtgccttgggtcttgtcctcgaagccggtgggacggcccatgctctgtttcttggagacgccggcgatggagaacggctggcacgggaatcccgcgagcagcaggtcgatgtcgggaacgtcatgctcgtcgaccttggtgatgtcgccggccacgggattctcgtcgtgccagttcgcctcataggtctgcacgctgtacttgttccactcggacgaatacaccacgtgcgcggcatcgcccagcgcctgcaccattcccatgcggatgccgccgatgccggcgaacaaatccgctatcctgatctcactcatacggttcctccgattcccgagaaacccaggatagcacatgagaagggcgcggcccgacaccccgcgaaatcatcggctgcgtagacgccatggttcgtcgtatcggcgtcaatgtgaaccagatcacgcacaacgtgaaccgcgagatgcacgccagcgaacgcgacgaggcaacggccgcgcacacggtgcggcagcgccggaaacttataggccggctcgaagtcatcatcacgcaagccgaccgtaaataatcccatggagttcgggagcacccccggacgccacgaccgtcacctcagtaagccggaacctccatcgaggccgtcgaggggaacaccgggcacgatgcccatcccgttcacggcatcattcgtcttttccacgaccccagacgattgggccaaagtcagcccgccgggcacatggccgacggcgttctgtgagagccaatcggagagccgggagtagtcgcccgtctcgtagtagcgcaggagcatagagacgaactgcgccttgtcttcgggagggatcgagaagacgccgatgccgtcgtgtatgagctggtggttggcaaccatcagcgcggtgcgcttgttgccgtccgaaaaccattgtccccgcgtgaccgcgccgaacagcagcatcgcagtgtcctccccttctgactcctccaggatgccgcgaaccctttcctgtgaggactcgacggcggggatctccggcacccatcccgtgccgccgaccctcacgccgtattcacgcaagcggccggcgtcgcgcacgcggccttcgccgatgatgcggttgtattcgcggatgtactgccaatcgactggatagtcgatgttgtcgagcaggaatccccacgcgcgcttgatgttgttcaccgtgactatatcgtccacgctcataccctcgggcgcgcgcccgtcgaagatctcctgcgtgtcggggaaggtgacgccatcaacctcgatcttggcggtgcgccagatcaaatcgaccagcagccgcttcgccagttccacggccgtgcgcctatccgtcgtcgtatcgttcctcaccggttccatcaaagccccttatccgtttccgataattctatcgaagtggccgtgccggcaaaggacgcatatctctcatagacgccatgcgccgccgtgccgggcgcgcgggcggagaatcatcgtatgataccgaatatcgtcaggggttcggacccggccggcctggtgcgctacctgttcggcaagggacggcgcaatgaacacaccgaccagcatctcgtgtgcgcgagcggcgacatgtttccctcgtttgacatggatggcaagccggcggcgtcgtatgcggagataggccgcaggttcgaccgacgctaccgcgtcagggaacgcaaggacgatccgttcccgcccgacatgcgaggcaagaacaaccccgaacgagagcatggcaggaagcgcgtgtggcactgctcgctcgccatcaaggccggccagggcatactgaccgaccaggaatgggaggccgtcatccgcgattatctgacgcgcatgaacatcatcgacggcgacgacgatcagggcgtcacatggctcgcggtccgccacggactgtccgccaacggcaacgaccacgtgcacatcatggtgcagctcgccgccgacgacgggtggatcaacccgtaccacgaccggatcaacgcgcagaaatcatgcaggcggatggagaagacacgccccgaactggtcgagctcgcacgctccgacaccggcacgcgcgtcagctggcagtacgggcaatggcgtcaatgggccgaatggaaggcgcgaaacgagtacggcgacgacgagggatgggatgcgctggacggcaacgagagaagccggctcgtcacggcggtcgccgcctccacgatgccacgccaatacatcgcccgaatcgtggaggcgtgcgccaaggcatcgcgcagcgaggacgagttcatacgccgcgtgcgcagggaaggcttctccatcgaccccaggctgcgcaagggaaccgccaaagactcgttcaccgaccccggccaggtggtcggctacaggatcacgtggcgcagcacggacgggtggacggaacggttcaacgccttcgagctcggcgacgacatgcgattgaaacgactgcgcgacgactgggcggacgatgccagaagccgcgccctagccgtgcaggaatggcgcgccgcgatggagaaccgcccgcccttcctcgacgacggacgagaaagacaccccgagaacctgtccacgcacgacatggaacgcctcgtatccgaagcgttctgcatcgccgccagcctcaacaacgcggcggacgacgacgaataccgggcagcgatgcgcgagggcctgcacacgttcgacatgctgcgcgaacgctacggaatcgcgccggaatacggtctatggagcatggtcgcctctgacgaggagaaccggccccgccgttaggacgcttcccggaaaaagctcagatggtacggcccgaggagggaaaaccgagcgaatcgggcaaagccgatgctggatcgagagagttcgccggctcgtctcccggcatgatcggctcgatggactcgttcgccttcgtccagcacgcgttcaggcgatcggccatccgcgcgtccaggccctcgcaggattcggatatgccggcgaggaccttccccgccatacgccgggccatatccgccaccctcgaaccatcgagaccgtgacgtgtcgccagatcctcccaatcctggggcgtggtgtgctccgcgaaggcgtgatcctcgttcaacggcatggtgagttcccagttgaactcgggccaatacctggtggcgaccgcatcatactggggagacaggcgtatccccgatgcgggatcgaggatcagggaatagttcttcgcatgtgcgtcgctgttggcggacgacgtgttgaaggccagcctttcgagccaccggtaggacagggaacccgacgcatcgatgcgttgcaggagatccaggcagtcatcggccgacggatcgtatttgtcgcgggtcggcaatcccaacgcttgcaggaagtcctcttgccgcagtcggacgattcggccttcctccaggcgacggtcgaaccgttccacgatataggccgtcttgcgctgcgccgtgatctcgccgcgtgccggtgtgtcgatgccgcacagttccgacaatcgcatcgtcgccagttccaccttggtcgcctcgggaaggtcatggggcttcggtttgacgatgtgggtggagggcagcatcatatccggccaataccacttgccgtccacgcgggacagtgtgaacttgccctgcgcccctcccaaggagaaccggcagtggctgtcctcgtcccaccagtagttcctggtccgctcgatgcggtcgatttcgttggctatctgggaatcggagatcagacgaagcgtcggcgatgggattggaggttccggggagagggagaacaccagtccgccggtggcgtcaacccggtccagcagatcgaagacgccggccgaggaggcattcaggtgctcacgcatggcctggcggacgttcggattgtcgggcaatagattgtccaggaagttacgcggtgcctggtctctccatccgccggttctgggcaggctcagactgatcggcagaccctcgttcgcgtcgtacgcgaacgatatgcgctcctcgtcgtcttccgagaacacgcccacatgatgcccgttctcccaggcgtgcagttccctcacagcagtctccccgcgtaggcggacggcagcgtttcggtgcggatgtgcagcaggtcgaacatcctgtacacgtagcggatggaggtcagaccggtctccacgagctcttcggcgcttgagaggggaaccccggctctcctggcgagttcggcggcgtcgagacccatgacggacatgcgttcgcgcacgcaacggcggaccgacgaggtgtcggggaagaaccgcgccgggttctcctccttctcgtcgggaagacccttgtaggcggtcagggcatcatatttcgacagatccaacgtcacgtgtgccatgctcgtcctttccggttccgaaagccgttgacaccatgatacggccatccgatgccggcgcaccccacgaacctcatggcaaggggtgcgccggcatcggcgtcagcgtgcgttgccgttggtctcgggttgcaggatctgcggcgtcgagacgttggcctggtcgggtatcggctggtccgtggggttcatggaggattccatggcgggactgtattcgccgaacgggtcgggcccgttccattcctcgggttcgttcaggtcgagtggcatttcctcgtatccgtcgggctccccggtcgtcaggtcgccgcctcccgtggtctcgggctcgggtccggatgccggtttgcgttcatcggcggcgggcttcgtatgctcccgcacgggtgtgggggtttcgacgattggcgcggcgtcagcgttctcggtgcgttcgacctcgcttatggtgctgggctcgtctcctgtggccttgttgtccgcgtgcgaggattccggcaggccctggtccttgaggaagctgattcgggaggcggcgtcgtccacgccgttgaccggcgcgcacatcacggcgtcaacgatcctgtcgtggtcgtagcccgtccattggccggtgagccgcgagtccacgaagaacgtggcgtcgtcgccgtgcgcggcctggaacgcctgcgtgtcctccacccgttgcaggtccacgggcacgccggccgtgttgaaggcgttcagggtggcctgcaacgcgggcgactggtcggtgtaggtgatgttcacgtggttggtcaattggtcggctgcggcgtcgatgtgcgtttccgggtggcgtttcgaccattcgtccttcagccgggccttcgcctcgatgatctgcctgcggtagccggggtcgttgccctccagttggtcggcgaccatccatccttgcaagagggacgagtcgcgcatcttcctccagccgtcgccgtcggcaagcacggtcgcgttcagggtggactcgaaccccttgttgaggcgttccctgttgtccatctcccattgttcgaggcggatggattgctgctgccgtctggtctgctcgtagcgttcgttctggacggcgcgttcggcgcgttccctgcggcgcgcgcggtcgccgctcagctcgttgtgcagggtgcgcagctgctgggcgacgctgttccagctctggaccatgatctggtcgaagccgtcctcgggatcagtttgagccattgtttctcctccttgttggtgtgatggtggtttccttgttttccttgccgcctgcggcggggaccgacaacgtttccaggatcggttcgcgccatgcccggttcgggcgttcgcagggcagcggttcgcccttcctggtgagattctgcttgcagtcgaggctggcgacgatgccacggtccttgtcgaaaacgcggtcgagcatcgacgccgcctggatgtagaagatcatcatctggccgggtgccttgcgcgcgttctcgtaggcgcgccacatggcgtcgagcgggaacacgagcgccggatagcgccaccagtcgctcacccattgcatgttcacggatgcgctctggtggtagcagaacacgttggccacgaacctttccacgaacgcggcgaggttcggatagtaggtctcgctgcgccgcattcgcgcgccgaactggccggacacgtcccttgcccgcgcgggatcgaggtcgccggattcgtctcggccgagatccgtcttcccctcctgcgcgggcagtatacgggtgtcggattcctccgcatcgtcctttggaggggtgtcgtcacggtccgttgcgtcttccggcgggttctcgtagccgttgccggtttccccggcatcggccggaatcccggatcggatgggttccgccgcgtgccggcctgccggcacctcgggtgcggtcggcgtcggctcgccttggcccggcatggtttcctcttcgatctccttgtcctcggggatgtgcggcgcttcggggttgggcagtcccttgccgtaaggcacgcccttctcctccaggatggcgcgggtgaacagttccagccatccgcagtccgatgacagcagggtcctggcggcaccgaccgcgcgctcccattcctccccatcagggccggacgtggtgttcgaggtgtgttcgctcattatgcggcctttctctgctcttctcgggctttcgccttggcctgcgccagggcgtcggcccattgcctgttgcccgtccatggcagggtcttgacgatctgcgcccgggattgggaggcaagcagcagcgcgcggccgacgggccattcggtcaggtcggaaacgtcgaggatgttctccttctggatcgagttgttcacgctgcgccggccggtgccgtcgatgttgacgctgcctcgcacgatctccctctggcccaccagctggctgatctcgccgaggaacttcgcgtccttgatgccgcccagatacacggtgatgttcgcgttgttgaacagcgagccgaagttcgtctcgccgaacgcggccctgccctggtcggggttctgccagatcgtcatgatcgggatgcccgccgaaccgaaatacgagtacacgtccgccagttcgggccagcggcagatgttcgcggcctcgtccagcacgcagcacaacgggaccggcagacggcggttgttgccggtgaactcggattgggcgcgttggaacgcggtgaacgccaccaccgccgtcaggctcgcggtcaacgcggtcgagggacggccctgggcggaaagcaggtacagggtgtcctcgctcgtggcgaactcgtagggatcgaacagaccacgccgctcgtcgatgttcccattcgtatcccggtgcgggtcgatccagtcgatgatctcggggtccgcgaggaacgcgaccatggtctgaaggctgccgaacacgccgcttcgggtttccggcgtcagcgcgatcacgctggacacgcgcgaggcgatgcccgcgtagcgcgggtattcgctcaggatgtcggccggcgacgtgtcgcgctcgttggagcaccacctgaacacgtcggacacggaacggcctcccagatgcgcggcgaacaggtagtcggcgagctgctgggcggcggtgccggggaagaagtcgtcgccgccggtctgcggctggcccgaggcgtaacgccagcagtcggcgatgcgtttcgcgtcggcgatggactgcaccgaggcgatcaggtcccacacccacggcgcgctcttccggttcgggtccgcgatgcgttcggggtcgaacgtccatatttcgccgttcggatggtcgagcctgcggatcggggcggtcacgtcgaggatatcgcccttgttcgaggtcgccaggcacgggcccggtgccgagagcacggccgggatcgcgtagcacagggacttgccggaacgagggcccgccagaacgatagccatgtcctcccagctggtgtacatcgacgtgttgtccacgatgttgagccccagcggatatcccggcgacatgcccttgcgccagtggtccgcttctatgagccttgacgccatggcctcggcgcgctggcgcgtcaccttctccacggcctcgccatggcccatggcaggcgcgtacacgtccacgcgggtgcgtgccttggcgccggttgcccacggcacggccttgctggcgatcagccacgcgcccacgccgcacgccacggccagtacgacgagcacggccacggccagcgcccactggcctgcggtcagcgaccattggccggagaccaggtacatgagcgcgaagatctggaagggatgccccgcatgggagcacacgagggcgaacgtcgtgaggatcagggacaccgcgacgatgatcgccagttcgatcttgcggctgggacggaccgtgccgcccagatccttcactcggttcgattgcagtttcggatcgacgtcggccaagattcatttctcctttcaagcatgacggcggaaccgatggaagcggtcccgccgtcgatgcgccagggcttgcgtcatggctagcgggcgttgcccgtcgtgaaatcggatggggtggaaaggaaatccggtgccgcagggtccgccggagcgggggccgcgcccggtgtcggatagcccgacagcggttcgaagggctcgccgttgaaagtgcggggaacgccgtcgccaacgtattcgccgcgcgaggcgtcaacctggtccgtccatggatccgttcgcccggcatcggccacggcaccggcctgttccttgttctggcgtttgcgttcgcgggcgagctggatgcgctgggacacgatggaatcgatctgcatggaatcgccgatcacgaccgggcgtgcgtatgccttgccgtccttctggctgatgaaggcgtcgggatcgcccatgcggccggtcgccaccacggcgtcgccctggcggaaatccatgccgtgcaggagctcggcagcctggccccagaatttcacggtggttctcaccgggccgagcggattgtccgtatagctgccgtccttctgacggactcgcgggcggtcctcatacacggtggcgcgcaggtacgccgagctcgtggtgccgtccgcgttggttttcgccggccagtaatcggggttcgcggcgaggagaccgcgaaccacttgcattgactgtggcatgatgatggtcctttcattcggggaataccagcgccttcaatggcggcggcgactcccatcatccggccggaccggtggcatcgcggggtacggcgtctacgtcagcgccccaaatgcccgccgttctcccacacgttcgtcacctccatggcgggatcggtttccggcagacggtcgagcacgcttgacgcgaaccggtccgaggcgtcgtagccgatggcctgttcggcgagttcccgcgccttctcgccgtcgcccatggcgaggctgagcatggccttcaggccgatgatccggtagcaggcgtccgtcggcgcgttggcctccaacgggccgaggatccccatcgccatgtcgatgcgcgccggatcgggcgtggtgccgttgtcgatcagccgggaaaacagcaggtcggtgttcaccatgccgtccggcgtattgatgcgttcgcgcaatgccggaagggataggggagcgttctcggccagtatgtcgctggcgatcatcatgcatgttgattcgggcgcgaactgcatcgtcacgcccaatacggcgagccggttcgcgtcggacgaccattcgcccgtggagcgtggttcggccatgagcttcgaccagtcgtaggcggcggcgttgcgccaggtggtgcgcacatgttccgagaatccgtcgtaggtcatgcctgagtccagatattcgtgtgtggctgcggtgatcagctcgtccaacggcggttcgtccgtatcggcggctgtggcctcgctctccacgatgaacgggatgcggggttcttcggaggccaggccgtccgtttcttccggctgctccccgttgatgcggtccgcttccatgcggtccactttgccggcgaaccattcggagcccgcgaaataggtgccgtccatcgaggagagcaccggctggaggatggatgccagttcgtcgtacacggcatcggggttccgcaacgcctcgatggtttcagtcgccgcgttgtattcgatgatgcggttcgccagccgcatggcaccgtcatcgggtcgcacgtcgtcatacgattcgccccaatgctcgatccatccgatcatcgtttcccgtgtgatccgctcttcggcatcggtgttctccaaaggcatgttcggctccttgacaatcctcggcggcaacccgctgttcccgccatgaccccgatcatcagtccaaggccatggcggggtggggcatggcgtctacagggttcttacaggtttcgtcccgtgcggccggtcaggtcgtccacgaggccgaggagttccggttcgggccagatggagttggcgaaaaggtagtcgtccgtcaggggccggtccttgaatatggttcgcgcgtcctcccggatcgaggccagcgagccgtcggcgatcatgccggtgaggtcctgtgtgcagtacaggtcgtatggcgtgaaccctttgccgttccaatcgatgtgatgggtgatcgaatactcgtattcgttccagtgctccatccatggaagggcgtggtcgccttcacgggtgacgaccgagtagcggaaccagccctcgggaacctgtatggcatcgtcgtcatacgggtccgtcagggaatcgaggtagccggcgacgatggattcgccggcatggaattccgtgtaccatgcgaggtcgggattgcgcagcgcggcgtgcagcgagtcgagcagtgcggcgtcgttcatcgtggtcctttcaccggttttccgtttccggcaggatgccggtgttgtcgtatattctgaacgtttcgacggcgtgcgcgacccgcgccctcgattcgccataggtggcggaatcgaccgtctcacgccatacgggttcacgggtttccgcattgccgtacggcttgggctcggtgggggttatcgacatttcgaagtcccatgaggatgcgccgtgctcggcggggcggaagtcgagagtgctgcggttgcccgtcagccgcagcagccgggattgctcgccgagccggtcggagagggatgcggagcgtgccacggcgcggatcatgcgtttcatgccggtggcgaggtggtctgtcatcgcagggttcccttctaggcgtgccatttgaggttcgtatcgttgaacccgcttttttcgagcgggcacatctccacgttgatggggattccgggcagtcctcccagtttgatcaggaaacggcccagacccttgtgcgaggcgtcggagccgaagttgaccggggtggcccaatcctccagcatgtcctcctcgcgccgggatacgggcagtccgcattcgccgcgcaggtagcggtccacctcgatgcggctcaaagcgcccagcaccttgatctcgctgcgttccacgaagccgcgcgccttggtgttctgcgccggggtctccatgcacatcaggtccttgaacgtgtgtgtgatcatgatctggcctacgccccactgcctgttcagacgggtgagcaggtcgagcttttcgaccatgagggggctggcgcgcaaagcgcggtgcatctcgtccatgatgatcacgtggttgcgccggggctgtaatccctcctcggcgagcacgtcggcggcgttcttcgcggcgaacgcgctcgtccatgtggtcgccagcacggcggcgaccacatcgtcgcccgactgggccagggcgctgatatcgaagtccacgggcctggacaggtcgatgcgcgcggtggtctggtcgccgaacagacggccgaacttcgtcatgcggttcgagaatccgtgcaggtcggccagaaggccgcgaacctgcgccctgtagagctcgtcgttttccgggtcgtcccagaccgccgccatacgcacctcgtcgggcccttccctcagcaggtctcgcaggtccgcgatgacgggaggctgcgggtcgtcgccgtgccggtcgtggagcacgcgcacggccacggaaaggatatcggattcgcgtgcggtcacgcccctggcaccggcatcggtgtcgttctcgcggccggtgcgcatgatcgtcaaaagcacctccatgagcgccgccctcgtgtcgttgtagtagtccgtcaggtccttgcgcgccttgccctccaagcgttgcagcgcataatggaggtcgccggggtccagggggttgaccacgccgatgcccgctcccagccggatgacctggccgccgagcatgttgaccagtgaggcgtagtcgggcttcagatcgccggggatgatcgcgttcatgcccagggcgctcagtcccagcacctcgcggcgcacgaacgtgctcttgccgatggccggcaggccgagcaggaacatagagggctgtttgatgatgccggccttgaaccagctgatcgggtcgcagcacacgccggcacccgtcatcaggcttcgcccgaccggcaccccctcggccggcagggccatgtcggtgccgaacggccagaacccgccgcacacctggttcgacgtgccgaagaactcgtctatcgtgggcatcagggccgcatagccgcctccacgcgagcgtttcccccgccacggcatcgggggcacgggctcgtccggtttggccttcaacggaccgagcagcatggattccatgcgtgccacggggtccgtggccgtggcgcttggcatggttccttttcgtttcgacggcttccatggcatcggcatcatgtgtcctccgttcaggacaggagccggccgagggggccggctggagtgtatgatctgacgttcaatccaaggggcaggcttgcggcgaatcccgtgtcctgtgccccgtagcaggggcgcaggtcgatcttcgcgccgcctgcggcctgttccacggcgcgtgacgcggcttcgagtcgttggctttcctgttcgcccctggacacggtgacggtgacgagcatcccgaagaacaccatgaccgcgccctggttcgtttcgacggcctggcggttggccttgcctatctggctcatggacctcaccgtggcgcgtttctcctggctgacctggttggctgccttctgcctgttctgttcggccatgaacatggtcttgtcgggcggcagcatccggtagagcacggtgacgcgcttgcggtcgcagtccgccaatgggctgagcagtcgggtgagcgtgtcggcggtcacgttgctttgcggcgggtccaccatctcccatgtgcggctcagcccggaatcgtgcgaataatggctccagccggcctcgtgcatgagcggcccgcaatcctcccatgcgatgtacgggggctcgtcggattcctcgatggtctcctgcgcggccggatcgtaggcgacgcggaccatgcgagtgatctcctccatgcccagggccctcgcggcaccgcctcccgcctgcgctatctgctcgcggatcgagggcagcagcaggcttatgcgacgcgcggcctccccggcctccaggtatttgccgtcacggtcggtgtagcggaaagtcaaggtgagcgtcacgtcgttggaagcgccgccggctgcgtactggtccatgatctgcgccatggcgcgcgccgcgagctcgggagcgtcctccacgatgcgtttgctcagcgtgcggcggaaacgcacgccggaatcgggtgccgtgtccacggtcacggccagttgggtgacgccggtctcggaggcgagcgattccatgagcccggcccacgaggccacgtacgagtcctccacgtcgtcgtcggcgaggctcgcgccctgcggctggcatgacaggagcagcgagtattcgccggtgtgcgaatgccgcaccaggcagaactcgccgcccagcccgtccagggcggaggtcaggaccaccctggagaggatgcccggcagcatggccttgccgccgtcgatcggcgcgagcaggccggaacggtacaggtttgcgccggtacgctgcgcggccatccacgtgcgtttctccacggtgcgatccaccatgttgcggtgctcgcggtccctgatcgccagcacgaggatgacgcccatgccgaccacgaggatcgcgatggccgcgaccacgctcgccatgctgaccagcagcgtgcaggtcaatacgcccatgcccgctatcgtcaacggtatgccgatgttgcggatgcctcccggcatcggccgcatccaatccccgtatgtcgtgttcgacgccatgattatccgaatctccttaacaaaacgtatgcgtcagaatgtcttgcctttgcgagtggtcgagcggtcggcaccgtccggggctccctcgcgggcgaacccgccggcatcgccgttcgccccctgcggcctgttgccgcctgacgggtcgggtggcgcgccatcgggtgccggcggaaccgggctccccgcaccattgccgttcgctccctgcggcttgccgtcgctgcccttgcggttcgctccctgcggcttgtcgccggtgttctgcggttcgccgcccgtgggattgccttccagcggcttggcgtgcttgccgccgccgttcgttccctgtggtttgccgtcgccccggccgagtccggaaagcagtccggccaaacctcggccggcaccgggtttggcaccgtccggtgacgcttcgccgcgtccgtcgccgccgcctttcctgccgcccttgccgcccatggccttgcgcaggccgccgccggccacggcgactcccatgccgagtatggagggcaggattccgccgccgccaccgccgaccgaggattgcacggcgggcacgatcacgcggatcatggcgggaaggaggatgatgacgctcagggtgagcatcagcgtgatggcctggctgtcgtcgccgggcccggccgtggccatgatcgccgagccggtcgccatgaccagtgcggcgacgggcttgtaggccaggaacgcggccagccagccgatggtcttggcgaaagcctgcttgcccgattccatccagctcatggcggcccacatgggtgccacgcccaccaggatcggcagcatcccggcgcggaagtaggcgaatatcttgctgatcagcccgcagatccacatcacgatggtgagcacgatggcgacgggcgcgccgagattgaagaacgagctcgcggccaggcttttcgattcccaggcgtcgttcatcatgccgcttgcggacctgagcacgtcggcggtccacgtgtcgaatgtggcctggaacgtgttgaccagtccggcaaggcacacggcgctcaggatcgcccacatgaacgccttgcccaacgggatcaggtcacgtccctcctgttgggtgacgagcttccagccggccgcgatcacgccgcacacggccgcgatgataaggaacgggtcaacctgcatacggatgtagtccgacaggaagaacgtggtgccgccgcccggcgtccatgacggcaggtccggattgccgccggacgagcgggagaagaacgtgagcgcgatgctcgcgcacgaggagccgagcagcacgccgagcagtatccagccgatgcggtcgagcagacggccctcgccgccctggccgatgttccacacgatgcgcgcgctcagcacgatcaggctgatcgcggcggctgcgacgagcacgccctgcgcgatgcgcaggtaccggttcaccggtgcgaaccatgaatcgtagtccggcgtggcgttcgcctgcaacgttgataccgtgtcgttcgcggcgaccagcgtgttgcggctggtggacagccattcgatcgtggaatccgattggacctggtacatgttccacagggtcttctccagccaggagagcttgcgctgcttccggcacgaggagtccttgtactcccatttgccctcgtcggacgactcctcctgatacgtgttctccaatgccctgcattgcagttccggagacttcctcagcagatccttcgccgccttcttggtgccgaccgcgaccacgccggtatgggcgggcgggtcgccgtactggtcgatgacccattggatctggctggggccgatcaggtcgccgagcctgccttcgggtatcttcatcacgtaggtggtctgggtgtcgctgatctgcttgtcgccgaacgtgagctccttgctgaacgatccgaagtcgggtccgccgcaggcggcgaggcccatgaggcaggcgagggcgagcggcagcgcgcacaggcgctgccgtatgcgtcgaatccctttcatggctttttctcagcagcttgcggtgacggacaggccgagtgcggcgaggatggcgacagcgcccgcaccgaggaagatgccgatcacccagttgacgagcttgtcgaacgtgtcgtcgcggtccggcacgccgtcgccctgctggcgcaggatgtgcacgccgatgcgcaccagcgcgaccacgccgatcaccaggctcagcgccttcacccagcccagggcggtggataccgggcccgagaatcccggaggcaggcacggggtcgggtcggaaagggcctcggcgaggatcgcgtatgtttcatgcagcattgggttgttcctttcgtgttaggttcatgcaccatcgtcagccgacatgggccgtggcgcggggcatggcgtctacgtccttcacgagccgtgagtacgcggccggataacgccggggaaacccgtcgagttcaagccctttgatatggggcagccgccacacgcggacggcggatgacagttggatgcgcgccgccaccaaaggccggggcatacggggcacggggtcggtgatggccgcgcccagcaggatcgatgcgccgaacagtccggccgactggtcggcgagcagcgcgcgcaacgattcgaggccgcgccccgtgcccatggcgcacaggatgatgcgcgacggcatggagggatcctggctcaccggcagcgcgcggccggcgtcggcgaaccggtcggggtccgaatggcggatcgtggtgcatccggcaccgccgtgcgcgcccaccagccacacgcggtcggtgacgggtgccgcgaacgacgggatcaacgtggtcagttgtggcatggtgttggtcctttcataggctcgggtcggtgccgggcagttgcgaggggtccgggttcgcgggcaccgaccagcccggagacgcggaaccaccggtcgagccggcggaaccgccggaggaatggtatccgccgcccgtcgggccggaacccgggcccgaagcggagccggagggcgtgtacgagtactgttgcggtgccggcgtgctctgctcctgcgcctgcgccgcagccgctgcggcctcctcctgcgctttcctttcctcgtcggccttgttcttcgcgtcgatggaggcgttcaccttgtccatggcgtcggtgatggccttctcgtcgcgcttgtcgatggaggcgcgcagcagggcgcgagaatattcgtcctgcaccttgccttcggaggaggaatacaatcgttcgccccgttcgaccgtatgggccagccgtgaggcgaacaccgcgcccgccgccttcttcagccgcgagagatttcccgtgtgcttcttttcgatggcttgcagcttggatgtggtggcgttggccgtttccgtgtccgtggcggcacatgcggggattcgctcgccctcggaatattgttcggccagcttgtcgagggtttccagggtttccgggtcggcgagcttgtcggccgtgaccgctttcgcctgtgcgagccggtcgccggcgagatattcgaccagcttccgttcggctttcttcgccgcagcgtgggcggtggcgcagtccgccgtcgcctgttccagctcgcgtgcggccgtggcggattcatgcgatctccacgcggacatgccggcgaccgtgacgcaggccgcgagcaggatgccgcccgcggtcgtggccatgcgcctccattcgcgcacgggcatggcggcatcccgatcgccgaccggcgtgaggtcgatcgtgtcggcgagatcggccggctccacggcaccgccaacgtgctgcggttccgatgccggggcatcggccgggatatcattccccaccggattcgaggccgatggcagcgggccgatctcccacggatcgacggccgtgttcgcccggccttcgcttccggcgtcgtccacgcatcgcgcatccggctccagcccgggcccgggctcgggttcgggttcggccggtggccggcgttccggttccggttctcgtgccgtgtcgatggcgacggcggtgccggcggcgattatggggcccatctcccatgggtccgtgccggaggtgttcatcggttcgggaagaggcgctggcgaaggctcgggcggtccggtgcggtggcggtcatgccgtcggcggcgtcggcctgccgttcgcgcagctgccgctgttccatgacccatgcgggatgctggccgtgttcgtgcgcgtccatgaggcagcgcgtgacctcgccctcgggcgagaccgccgcgagccggcccagatggccggtgaacgcggcctcgggatcgccctgcatgaagctcatgtacgcggccgcctcaagcgcgccctcccttcgcgcggaatccgggatggtgttggacagccgccacagcagtgcgggtatgtcctggtggaactcgctgttggcgatctcgcgcacgttgtagtcggcctggtaccacggtttgacctggcccgaggcgaacaggggcaaggcgcgcggatcatgctcggcgaccatgaggaaacgggcgcgttccatgcccggcgatatcagcttggcgcacacggcgtcgcgcagccccgtgtcgccggacagcgacgccagcagtcccgccgtggcatggtccttttccgcgtccgcgccgatgcggtattgtccggcgcgcagcgagtcgagaaaatcgaatacggccaatgcggtttgcctgtcagccatgtgcaacctccagaggaatgatgatggtgcgaacaatgtcagagtcgatgatgcgccgggtcgcgggccgctgcggggcgcaccgtctacaggccccatcgggagcacggttccacggttccacgggttcacgggttccgggcatggaaaaggcccttcgccgggggagaggctggcgaagggcctggggttcacacgccgtccggggcacgggattcggaaagctttatgcccctttccggcatgtgaagtcaatggagggcgtcccggccgtcatcggacgacgaggccggaacgccacggggtcacttgcccgcgttcacggccgtgtggcggccggaaccctgtgcgtagtggcgcttgcggaacacgagcagggagccgcccgcgagcagcaccgccagggcgccgccggcaaggccgagcacggccgtgccggtggaggccaacggcttggcacggtagccgttccagtcgtcggtgttgctggcggtctgggtgtcggcgcacagctgcttgccgtcgatctcggtcacgtcgccggtggagtattccggatcggtgtcttcgccgccgtcggtcttgtcgttgaacgggtcgccgttggacggcgcgcattccacgagcggggttccggtgacgatggcgcgatccgtgtgggtctcgccttccttgacgcccttgagcgtgccggtcacgctgaccgattcgcccggcttgagcaccagggtgtcccagttgtcggggtaggtgagcgaatccatgtccacgtgcgcgtcgccgacgatggtggagtcgtcgaggttcaggtcgcttgccttgtaccatgcgccgtcgccggtggccgggtcggtcttggaggtgttcgtgatgatgaacgtgatgccgatgctgtcggcgtccatcttcagcgcctgcttcgggtcgtcgcggtccgcctgctcctggccttcctgcttgagggtcggggtatcgaccttttcgaggtggatgctcggggtcatgtccggggtcttggtgacgaccttgttggattcgcgcggctggccgttgatggtctcggtccacgtgttgggcacctcgtcggccacggcgatgcgcttgcactggaggtagagcacccagccggcctcgtgctcgttgtcggcgctcacgaggtcgaggtaggtctgggtcgcgtcggccgtgaccttgccgttgtcgtcggcgtccacggtgaacaggttgccgccgaacttcgaggagtcgaagccgctgcccgcgatcttctcgcccttggccgcgagcatctggccgtccctgtacaggtcgcggctggcgtagacggcccagttgcccaggtactggtcgtactcggtgttcagctggtccgtgccgccccagtccgtgacggtctggtaggcgcggtccgggggcaggatgctggaatccaggcggtagaggaacgtgtggttcagatacacgctcttgccgtcgatgctgtcgccgccgacctgcacggtcacgtccttggtcgggttgatctccttcagcgggttggtgacggtgttggtcttgtcgcgcttgtcgttcgtgacctgcgtggcggtgttctccaccgtgtggccgtccttgaccttggtgacggtcatcggcatgaccacctggtaggtgtggcccagcagcgactggtcgatgctcgggtccttcagcgggtcgtaatccttgtcggttttctcgctgtaggccttcaggtcgtcgggttgcgggtcgccgggcacggtctcgccggtcgcggggatctgggtgtccacggttttggcgaaggcgtagagcacgccgtccttgtcctggatgttgaactcgccggtgcggtccctgccggtctcgtcaaggatctccacgtgcttcgcgtcgagggtcaggtactcctggtcgtagtcgtccgtcatgcccaagcgccataccttgtaggcggtgtcggtgagcctggaggcgtcgatgttgacgcggtagtacaccttgtcgcccagcagcgcggtcttgccgtcgatgttgatggtcgggtccttctgcgtgtcctgcttggagggcttgatgaccggcggctcgttctcgaccttgttggacggggtgacgccgttgttgacggtcagcgcggccttgttgtcgacggtcttgtcggtgggcgcgtcctcgttcaccttggcctcgaagcgcagcagcacgcgcgggttggagccggccttccagttggcggcaacccagtccttggtgaacgtggcctcgaacgagtgggccttctcgtcccactgcaccttgtaggcgctcttcgggatgatgccgccggttcccaggtcggtgatctccagggtttgcttgttcgcggtggtgtactcggaataggtgtcgctcagcttgatggcggtcaccgaatatgcctggtccgcggggatctgcgggtccacgcgcacggtgtattccacggtctggccggggaacacggtcttggtgtcgatgctggactggtcgccgccctgggaggattcggcgatgacctgcttgtggatcgggggcacggtcacgcagatcttcggcgtgttggtgtccaccgtgctgccgccgaccgtctggccgcccttgttgtcgaggtcgtcgcccttcgggtccgcgcacgtgttgagctcgtcgccctccgccttgccgtaggattcgagcagcttcacggtgtcgaagttcacgtcgaaggggatcacgacgctgatctgcttcgcggtcttcaggtccttctgcgcggcctcgtaggagtccttcgcgctgaccgtgaccttggtgccctcggcggtgatgtcgaactggtcggtcacgtccttgccggtcttgttcaggtcgttgacgctggcgttggcctcgtcggtggtgtcctgctcgtagaccttgatgttggaggtgtctttcaggtcgaggatgctatcgacgttggcgaagtcgtcggtccacgcgatctcgggcacgcggcccaatcctgtgggcagggtgccggagatgaccgccgccacctcgtcgccgagacggtagtacttgtcgtcgccgcccaccttgtcgctcttggtcggatcgacggtcagctgccacttgccgccgaccttcatggcccacgccttgttggggttgggtgtccacacgaacaccggcggctcgttggtcggtcgggtctcgttgttccacttctcgtacgccttgttggtcaattggatcttcttgccctcggtggcaccctttttgatggtgcccgtcaggtagaacctgaccttgctcgcgctgttcctgaacatcgtcttggcgatgtacgaagccttcgcggtggcggtcgcggtcccggccttccggtcgatcacgatatcgaactggtcggtctcgtccttgccgtcgacgaacaccttgccggacttccagtcgatccactggttcgaaccggtcagatcatcggtgatggaataggatgccagcgggttgagcaggtgcgcggggatgctgccgttgacgaccacgcccacctggtcgcccacgaggaaagtcttctgatcgacgccctgctggttggtccattgcttgtcctcggccacgagagcgccggactcgtccagcacccacaccttgtccggggtcggcgtgaccttgcccacgctgtcgttgttgccggtctggcagtcggccaggctgccggtgccgttgtctccgttccagcacgccacggaaccgtcgttgatctcgtagtcgccgccggtgggtttggccgactgtggcacgttcagcgtgtagaggccggaatgcggggcggtggcgtgcgccttgaccacgcgcttgccatcgatggaatcgtcgatggaaatgtccgccggcacgatgttgccgttcgcgtcggtcacggtcaccttgctcacgtcgtcctgctcggtgccgccgatcaccacgtccctggtgtcgatcgtgtcgtagatccagaacttgccggaggcgttggaatgcgccttgatgtgcgccgtgtacaggctgccggaggcgatggagtcgttgccgtcctgcaccgtctggccggcctcgttggtcagccatttctcgggcggggtggtggtcttctcgccggactccttgccgtcgttctctcccttgtgggagaccgcctcggccatgttgccctgcttcgccacgtcaacgtcccaccagcgcttgcccgcaggccacgactcccacgaggcgtccatgtccttgaaggacgcgctcactgtggcgctgcccttgttggatgcggtgaactgcttcgccaccgtcttctcggtgccgtcgatgccacgccagtgcagggtcgcggtgccgttcacgttctcggtcttcgacccgtcgctggacagggtgatcgtgtccgaggcgtccttggtgtcgcccgactggcccgacatctccgcagcctgcgtgctcacgctcaagtgataggtcggtggtgccggctggtacttgtccagcacgatcaccacgatcgagggcttgctggaagcctccacattacgacgcataatcgcatccacgctgttcgacggatcatcatcgaacggatatgaggtcctatatacggtgctgccatactggtatgttcctggagctacgtaggtgttccagttgtcgtaccagccgccggtcccggtcggcgaagcctggccggacccgttgtagatgtagttgccgccgatgacggctggcaccgcgccgactgcgaccactcggcagtcgccgttgccctcgccggggtgacgccgctggaaaccggtctcgcattccgtacgggcttggtccaatgcggcctgcgccttcgtgacgccatcgccctccaacgtcacgccggcattgttcatggcggcgcgcaccgagtcaagactcgtggccgggccccatgcgcccgaagcgtcgtccttgtattgccagaattgcaccgcgtccaggttgccgcccgtgccgggctggttgccgccgccaccgcccgcgaacgcggtcgatgcgacgacgccgccggcaccaagcgtggcgatcgcagccaccgccgcgacaccggccttcatcatcttcctgccaaagttcatgtaaatgaacctccgttaaccttgtctgttcatcccctccctcaatcgttccggtcatggccccgccgcctcttttttcaaggggtggcggggcttccgaccgcaggaataacgggaggtagccaccggttgccccggcagccaccaacaagcctcacaggcgacacgccgagccacggagcatggcgtctacaaaaaatccggaagtatttcccggcaatacgggtacacgggaatgcgggggacacaggttcacagggacatggctttcctttgcgaaatccatgaaaaaggcccgtaccggtttcccgatacgagccataatcagtcattcatcgatcagtgatggtaatagccatcatccttgccggtgcagctgttgccgcagccgtatgcgccgttgaggttcggctttggggcggcggcggccgggccggtgccgcccgatgtggtgccacggtatgtgttggagccggaagtggagccttccgtgcgcctgtacgcgccgccggagtaggaggagccgccgttgtaggtggattgggcctgcgcctgagcctgggcggccgctgcggcggcttgcgcatccgcgtccgtctttgcctggacgctcgcgttcacgccgttgatggcatcctccagcgttttgcgcgctccgtcgatcttcgccggatcgttcccgtccttcagcccgttcgccgcgtcgatggcgttcgacaatgcgtcgcgggtggcgttgtccgcgaccttgccgtccgaatccgcgagcagcttcgacgcctcgtccagcttcgccgtcagattcgttttcgcgtcatccagcctcttcgcggccttggattcgatgacggccctcaccgccttcgacaggctctgttcgtgggtcttgtaccagtcggcctgttcattgagcttcacggtggcggcatccagtccttgcgcgttttcggccacgcagccctcgtattcgggtgccgaggccttgagctccttgcccaaggattcgacggtcttcgagtccttgacctgttcggccttgacggcggcggcatcggcggcatcgccgttgagcagcgcgttgtattcattggcattgttgcgcacggtgtcggcggcggtggcgcacgcctccttggcctcggcgagcttcgcgccgctgtaagcgttccagccgatgatgccggccacgaccagaatcaccgcgcagacggccgcgaccaggggcggcagccacttcggacacttccttccatccttgcttggctctgtgatgttctcggcgggtgtttcgacgggttcgaggatttccgtcttgtcgttctcgttcatcattgttctccttgcattgataacgctttattgatctgccgggatacccgcgtcggattgcagcgtttcccgcgcgatgtcgagtagccgctcgtcgcggccgggttgggcgtccgctgtgtgggggagccagtcctgatcgacgtcgagggtcaggtcatcgaaggcctgttgcccgtcatcgcggcccagcaggccgcgtagcctgaacgtctcgttcatgtgctgtccgtcccattcgatgcgccgggcgtacagcaggaaatccagagtaaggaaccccggcccggccttgtccacctgcacgtaccgggagcgcgtcggcgtgaatctcacccgcggcacgcctttcagccgttcgtgcaacgggctgtccggcacgatgtagcgtttgaccaggttctgtccgccggccgcgaagaacagcatctgcggcagattgccgtaggtcgcgtcgtagtagcgccatccctggtcgtcccgccatttgcgaagcatgtcacgggcggcccccggccccagatggatgccggagaaccgttcccacgccagcgtcacccggtcgaactcgccgcgcatgagaccatacagggcccgcccggtctggtccttcggatgacgtctcgctcgggtgtccgtccgatggttcggattcgcatacgggcagtgcagataggcgtcctcgtcgtagcggcacaggcccggcacgtcgccccggtggtgtcgcccgtagggccggcgcgcacggctttcctcctgccggcggaacaggccgacgatctggatgggattgtcgcacagcgggcacaccgcgtagtaggacggccccttgtcgccgtcacgacgccacggggccacgccgccggtgcacctcatgtatgactcctggctgatcacgatgctttccgcccttcccggccatgccttgaacgcatccatagtcggctcccctcgccgcgcatcgtcgtcatcgatacctcctgttgattctaacccaccaatccgccggcagctcgggcaccgcgccctcgcgttcggcgaacgcgaggcacgcgagcaccgtgcgtaatcccaacgggaactcccgtcgtccctgacgcatcaggaacgtccagtcctccgtgcactcctcgcaatccgaatggtccatgatcccgcgacgggccagtgcggcccgctcctcgatgtcatccgtcatcatccactccttcttccgtcttgcttcgcctcggcccttgcgtccgccgcgtcgaggggagggcagtcgcgttcgatccatgccgtgagcatgtcgcggatggtggtgccgcgtcgcacggcctcggccttgaaccgtttcttgagcatggggtcgagctccaccgtgatcttgggcagcttgaccggtttcttgtagtcggtgagggtcgatgccagcatgttcctcgtggtcatcggcttgttgatctccatgatgttgttcctttccgtgtccccgtgtccacgggtttgcgtggacacgggtttccgggtttccggttctgcgggtgtcaggcgttgaatgcgtcgctgagttccttggcgataagcccgtagcccgaggcggacgggaaccggccctcgtccggcgcgaggcgcatggcctccttgtacgggatggtctccctgcaatgggccagtccgttctcggccaggaactcctcggcgtgcctgaggctgcgcgtgccgtagcgggtctgggtcagcagcaccgaggagggcttgttgatctgccggatggtctccagcatgcgttccaggtcgatggggccggtggtggtgacgagcagcacgaggtcggccgcgtccaccgccgcctccaccagatcggtctgcaagggaggcgtgtcgatcagcacccattcctcctcggcgggcgcggcgacggtgaaccggttgacgacctccaccccgaagggcagtgggcggccggccgatagggccttgtgcgcccacagggtcgccgcgccggacgggtcggcgtcgcgcaccgtcacggtatggcccagtcgggcgagtgcttcggcggtgccgatggcgctggtggtcttgccgaccccgcccttgaggttgacgaaggccaccgttttcgtgttcgtggtcattgggattgttcctttcattcgggtttccggcttcccgtgtccacgggtgcacggttccacggtttgccgcgtatacgggtttccggaatggttcgtccttatggggccggaccggttatctgtatcggattgtcttcagaagagggtgtcctgcaagggcggggtgtgtgtggcggcggccggggccttcgccttgccggtcgagtgtgtggtggcgcgccatcgttgctggcgtgcgttgcgctgctcggtcttgcggcgtttgcattcgcgttcgcgtgccgccgccacgatctcggggttctcgcggatgtaccgggcgagccgccgttcggcggtcgggtcgtcggggtcgaaccggaatccggcctcctgcgcggtcttcagcacctggcgtcgggcgcgcaggggcagtccgccgtagatgccgtactggtcccggaccatgatgccgaacgcgaggcattcggcactgaccgggcaggcctcgcagatccgcaccgccgcgcggcgcagctcgtattgggttcgctggttgggaaggtcgtcgggcccccacatgcggtccgaccacgagtcggggaaatccgcgcattcgcctttcaggaacatgccggcacctccttcggcccacggccgccgatgaagccgaaacggacggacgccggcccggtcccggacggcttccgctgcccgaagccgtcgtccttctccctggattccgcgtccaggaaggcgcggcccgcccgcaatgcctccagcacggccccgcgttcgccttcggcatcgttcgcggggacgcgcttcagcagccggcgcagggtgcgtggtgcctcgaacccgtcattgcccgcatcgaagtcgtaagggtcgagcagtttgttcactcgtcggtccaggtcgtccgggatgccgtagttcggcaccttctccctggattccgcgcttggcggttgcgccgtttcgcccttgtcggcgaggatgccgtgttcggcgagcaggcgacgcccgtgggggtcgtcggccatctggaggcatacctggtcccagtgccgtgcgagggagcgggggccggtgagcgtgcgacgccagaaaccgtcatacggtttgccggaagcgtcgcccttgtcggtcttggaaggcggcagcgacacccattcggccacggccagcaccagtggcatgccgtggcgggcgatcagccgtcgggcggcgtcgagttcgcgtttgccgggccgggccaacggttcgggcaccggcatcggcggcatggcgcgcagcccgtccgccatcgtgcggcacaccgcctccgcgtcggaaccggccccggcggattcgctgcttgggggttcggctccggcggtgtcggcccatgaaccgtcctcgcggattccgtcatcgtccggggaggtctctccgcttgcggggagatgccccgtaggggcagaggggttattacgtactagggacgtactgtagctcaccaggtgagctgggggtggggtcacagctgtgaaccgtggttcacccgtgagctggggttttcccgtgtccccgtcgacataaccacggtccacatgtgagccggggtttcccttcgccctgttttccgtggaaggccgtccgcctcgggtcgagtcgatgtcgttcgagtcgaagaagtcggggtcgagctccagacggttccctaggcacaggtcccacacgacgggccggtgccactcgctgaaatgcccggcctggcgttggtcgccgcgacggatcagcccgttcgcttccagccatgacaggtggcgtttgaccgtgctcacgctgcacttgcaccacgcggccagcttcctgtgcgtcggatgcgcgttgcgcccctcgtcgtcggccacgttcgccagacacatcagcacgcgagcggcaccgttgtgcctggcgtccacgggcgcgaacctgagcgcccaatcgaccgcgttcacgctcatgcggcaccccctcggcgggagtcttgcagacgtgcgcgcagcatgggcacgcgcggcacgggaacgtcgagcatcatcgacaggtagaagtcgtggctgccgtccgacgggcaggccgccaacaggcccgaagcggaaccacgggccgggaagccgccatgacgcccggcacgctcaagcgtttcatgcgctctcatggctctcctcactcacggaaccggccgactcctcacgccaacgggcctcaagcatgtcgcggcgcgtggccgcgcggcacagggcgaacgtcagcagataggacgcggcgagaacgaaaacgacggcgatcacgagtatgaggtgcatcatcggcccgcccccattgatcgcgcgagggaggccagcagacggaccacgagaagcacgatgccgacggccagacgcaggaacggcagcaacaggccgaaacaggccaccgcgagcaccacgaacagcaggatcaccaattccaccactcatcacccccgctcaccgaaggatgcctgagcatcgagaacaccgcgtcatcgccgctgagggcctccacgtcgcgcatcaacgcgtcgatctcgtcggacaccatgcccgcaccggcctcgtagccgcggttgaacacgcaatccgacggaccgccatggatcagacgacggttcaccgtccgagccggcgacgaagcgttccgcacgtcacgaagcgcgtcatgccggccgatcagataggcgaccgccatgacctccctcacggtcatcgacgcatccacggacagggacaacagggacatgtagtcccggaaattcgagcgctcctcgttatcgagggaacgcgcgccaacggtcacggtcattgcctcacctccgcgtgaagggaccagaaagcgaaatcccaggcatcacgcgagttacggtcgcaccagcaacccacacaagccaggccgcaggccaccggcaccaaagcgaatcccggcagaagcagattcctcgcggcaagcagaatcgccagaaaaaccacgcacgacaacgcggccagcatcgaagcggcaagacccgccagctcgtagcgccgggcagaacgtcgccaatacaaagattcggaaaatgtagacgccatgcaccgcgaaccattcacgggggcgttaccatcaaaatcagaagtcggcacagcgacttcggttacactagacatttgtgcagcctccataatctaaaaggcaatgcgaacgattcaaaagtttggcgactggggaatcgtccgacattggatgtgttgcatacgcccggtttcgatgtatcagatcgagaccgggcattttcttgaaatgagaaaaaccactaacctcctcttctactgggtccagccatcaagtgattgccttctcgcaagagggcaggttattgatgccaagaacgaaatcagcggaaagtccgtagtggtcataaagaaacagcaagtccttctgctgccagcccaaatgcccgttctctttctgagaaagagtggaagcggattggcccatgtcggcagcaagggcagcctgagtcacatcgtgatccttcctccactgtttcatcggagaagccatatctactcttttcctaaagtctttagcctaactaatgtttttagaatacactttggtttgactaaagtcaaatcgcaaactagagtatcttaatgagataaaggtttattgatagaataggattagaatatgcgtacattattatccgcagatcaggcgaatcagacaccccccgataccttgggcgaatacacagaacgtgtgctcaactacaatgtggacgcccggcgcaagcagctgaagcgaacccagaaatcactgatgcagccgatgggggttacaagcgaaggggctgtatctcaacgactcaaaggcattactcattggtctctgattagcgcggtcaatgttgcccagagcctcgatacaagtattgaaaaactacttgatgacagtgccatgaagatggagatcgaacgccaagcggtcgcactgcgcgttcaactggatcaaataaatcagatgacgggaaacaagaaagccaccggcgacacgccggtggcttcaggtgagctcctgcggctgggcttgaaccagcgaccgtccgattaacagtcggatgctctgccaactgagctacgcaggaatattcaattttcatcccgtccggagttacccgttcaggtgagctcctgcggctgggcttgaaccagcgaccgtccgattaacagtcggatgctctgccaactgagctacgcaggaatgtctgctgtgtttgagatttctctcgcgcacaagtcacatatcttacatgcctgccacgaaaaagcaaattacatgcgtgtagggcatgtcgcgctgaattccgcagaatcggactcatcggatactatctcatacagccaaaaaccgaacgcggatatacactagcgactaacggtagaggagctggtgtctgcttggcaaatactggaatcggtgaaacggaacaaccgtctgagtatgcgaacccagtgggaacaatcacaagagttctgatgttccgctgtcactgcatggcagcggttgtgacatggatcggccgcggctgaaggtcgaacaacatgacgatgcggcgatactgtcacgcgaaatttcattgtggataacttcggaagctagaaccacataggtcgttttggctggacatcctgtttcggacccctcaaggtgggtatcaccggcaaagaagccggaatcacatcacactcacactatggggaggaatctcatgaatgcaccactgttgtttgattggcgtcgcgacgaagcccgacgtgccagccggcggcgtcagcaggcgcgtcagcgggctcaggaacggcaacggcgtatggatgccataatcgcgttggccgccgttatcggcctgctgcttgccttgggagtagggctggcatccacgcctcagcatgttgcgcatgcggatactgcggtgaccggagatgcggcatacacggtggaggatttcaccgatatgtctgatttggcgtggcgcaatggcaatcagtgcgaatcccgattcgactggccggtcgacgatccacaggtcgaacaacagttcgagcggccgatcaacccgtgggcaccgggtcatcgtggagtggatcttgttgcggagcaaggtaccgtaattctgtcaccacaggcagggaccgtgagttttgctggcaaagtagctggcaaagatgtggtgagtgtacggcatcgtggaggtgtcacgtcgacattcgaaccggccgttaccgagctctcagtgggggatacgatctcccgcagacagcccgtaggcatcgttgaaggcagctcggaccattgcgaagaccgttgcctgcattggggcctcaagcgaggaacggccgattatcttgatccacagcaatatgcggggagtcgaaaaatcgtactgaaaccgtcatgatttaacggtgattgtcggccggaacagggccgtacggaagagacatcgcaggcggctagcggcgtgacgagtatgaatcacagaccggcatcggccaaggaaatatatccggggtcgatcagcgcggacttgagattgctggcgctgacagccagcaacggttcgctgatggtcgggatcttcttcacgccgcctacctcggagttcctgattgaaggcatggaattcagcgcttcgtccttgttgagcttggcgcaggcctgagcgatatccgtggcgatggtctgtctgtcttccatgccggtcatccattgcttgccattgacgatggatgggatgttcgagacatacgcgccgtatccggttactagaggccactgcgagtcacggtccttgtcggaagcggaggtgtcctcgtccgcatcgtcatcggaactggatgagtcgtttgcgttgtcgttttcaggggatttgatcgggtccggcacggcgtcgcggctgagatccttcttgccggtgatattgccgacaatgcccgagatggtgatctgcggattgatatcggcggcagagccggtgtatcccagatcgtccaattccttgacgacctcggaggcgatgtagtcgttcatcgtgatgatgccgtcaatacgggtgagtgtggactgtccgtcggtttttgccagacgcttgtcaagcactttcgcagtggagccttccttagcggcatcgtaggccacggcttgccaatcgttttccgtggatttgccgtccaaggtgcctgaagggctttccacaacgcccttctgatagtaggagcccagtacctgccagataccacggaacgcctcttgggcgaacgtggaatcgttggcgttgcctttttcgtccacggcggtgtatggcagcagcacctcaatgtatttggggttgtctttactggccttatccaacttgagtttggacaccatcttttccgcctgtagcttgccgatggtctgggcgtccgagaacttgacgaaggcgtccggcttatatccctcgatactgttgccgagcaataccacatgcatgccggattccttggccagcttgagcgatgagaccagccggtccacggcctgcgcctgctcgtccgatgcagtgctgtcgctctcagtgttggacgaatcgtctttggacgagtcgtcttcggaagattcaccgtcagaagtagcttccccatccgtggcatcgttggtgctcaggttctggctgatgtaatcgccgtattggcgagtggaagcgtcggcctcgactactggagccacgagcaatgtcatgttgtcgggcgcgatggcaatgccggaatcgtccgtggtgttattcgaaagatgatcgaccacaaagtcttggatggcgcggctttgcttggccaacgagtcggacgtcgtatgatcgatatcgcctttcttgaaaccggcgtcggccagagccttggctaggtcaggcaccagcttcgcccatttgttcagtggcgtctgctggttcagcgtaatgccgtccgaaggtgtgaacacggccacgccgccggcagaattggacgtcaccgtggtttgaccatctacaacggtcttattgtctgaggtgcacgcggtcagtgacagcaccatcgcgcaggatgcgataatggcggcgagcagggtggttgagcggcgtgcgaacaccataagcggcgaaacctcctcaagcgggcgtgaaaacaagctgaatcacgattctagtaggccgtatacgaaaaagtcccggaccagtggacaaatcgccacatatccgggaacaattagaggtattacgtgcgtgcatcgaacaactgtcatgattatcgtgctgaggaacattccagatgaagcacgacaatcatgacagtttgcgacatgacatgacccatgtaggtccgcacgatgtgttcgatgatttactcggccagagccttggccaggttctcgtccagcgcgttcatgaagccgtcggtgtcgagccacggttcgtccgggccgatgagcatggccagatccttggtcatctgaccgccttcaacggtgtcgacgatgaccttctccagcgtcttggcgaagtgacggacttcgggcgtgccgtccagatcggcgcggtgcttaaggccgccggtccacgcgaagatggatgcgattgggttggtggaggtcttctcgcccttctgccagcggcggtagtgacgggtcacggtgccgtgcgccgcttcggcctcgacggtctggccgtccggggtcatgagcacggaggtcatgaggcccagcgaaccgaagccctgggccacggagtcggactgcacatcgccatcgtagttcttgcaggcccagatgtaaccgccgtgccacttcagggagctggccaccatgtcgtcgatcaggcggtgctcgtaagtcaggccggcctcggcgtacctgtccttgtattcggtctcgaacacctcggcaaagatgtccttgaactggccgtcgtaggccttcaaaatcgtgttcttggtggacaagtacaccgggtaatgacgcatcaggccgtagttgaagcaggcgcgagcgaaaccgcggatcgaatcgttgacgttgtactgcacctgggccacgccgccgtcttcgccgtagttgtagaccacgtgctgaatcggctcggagccatcgtccggagtgaaggtgacggtcagctggccggctcccggaaccttgaaatcggtggccttgtactggtcgccgaatgcgtgacgggctacgacgatcggcttggtccagccgggcaccagacgaggcacgttgctcatcacaatcggctcgcggaagatcgtgccgcccaggatgttgcggatggtgccgttgggggacttccacatcttcttgagaccgaattccttgactcgggcctcatcgggggtgatggtggcgcacttgacaccgacatggtgcttctggatggcgtgggcggcgtcgatggtcacctggtcatcggtctcgtcgcggtgctcgatgcccagatcgtagtagtcgaggttcacgtcgaggtacggcaggatcagacgatccttgatgtccttccagatcacgcgggtcatctcgtcgccgtcgagttcgacgacagtgccttcgaccttgattttggccatgcttcctcctgatagatggtgtgaagatgatttagtcatagcgcatgtttgtaacgacttgaagcaatcgtccggtccgtgggaaacggccttgttggcgtcccacccgggcaataggctggaaaccatgtctcaggaaattgaaatcggtttgggcaaaaaaggccgtctcggctacgcactcgacgatgtggcaatcgtcccctcccgtcgcacccgcgaccccgaggacgtctccacctcttggcagatcgacgcctatgagttcgatgtgccggtgatcggcgcccccatggattcggtgaccagcccggccaccgccatcgccatgggcaagatgggtgcgctcggcgtgctcgatctggaaggtctgtggacccgttacgaggatccgaccccgctgttggacgaaatcgccggactgccggccgatcaggccaccgagcgtatccagcagatctatgccgagccggtcaagccggagctcatcacgcaacgtctgcacgagattcgcgccgccggtgtcaccgtggccggcgcgctctccccgcagcgcacccagcagttctactccaccgtggtggacgcgggcgtggacctgttcgtgatccgcggcactgtggtctccgccgagcacgtctcctccggccaggaaccgctgaacctcaagaagttcatctacgaccttgacgtgcctgtcatcgtcggcggcgcatccaactacaccgctgccctgcacctgatgcgcaccggcgcggccggcgtgctcgtcggcttcggcggcggcgcggtctccgccacccgccagaccatcggcgtgcaggccccgatggccaccgccatcgccgacgtggccgaggcccgccgcgactacatggacgaatccggcggccgctacgtgcaggtcatcgccgacggcggcatgggcgactccggcagcttcgtcaaggccctggccctcggcgccgacgcggtcatgctcggcgcgccgctggcccgcgccaccgaggcccccggcaagggcacccactggggttctgaagcccgccaccagacgctgccgcgtggctaccgcaccacggtcggcacggtcggcccgctcgaacaggtgctgttcggaccgagccaccaggcggacggcaagaccaacttcatcggcgccctcaagcgcgcgatggcctccaccggctacgtcgacgtgaagaacttccagcgttgcggcatggtggtcaacccgtattccgcacgataatcccgattgccccctgaaaatgggggtttgccctccatgcaggaggcttaacttgcccgaaggcgcgctcaagtagtttgacttggcgcgcctttcgtgatgttgtagtacagacgctcgccgatgatggtgagttgcaagggggcttgaagggggtcatcatggagtattcgggatttttccacggcacatatcagtacgggccgttgccgagttatgacggattcatcgttgtggagctgtcggatcgcccggtgcggtatcacatccaacccacattcataggcgggctgaatgcgaaggaatgtcattccatggccatggctgcatgccgcatcgcctgcacatcggcggacgcgatacgtggcaaactcagcgtcgcacatctcaacagagccatgacaaaaccatgcctggaccggctgcaaaccatgcaatacctgctcggcatccacatggtcactcatccggagctcaaagcgaaattctgctatctgcccactgtccccacattgatcgacggcatgatcaccggcaaggacacgctggaaatggcggtattcatgaccatcggccaggaaaatctgcgagtcaacctcaaactgaagtacatcggttctcgatggatgtgcatctatgccgatttgggctgaccagacggccccgcccgcacaccgattcctacgctggtagcggaagacggttctgccgtgtcataggctggttcgcctatagtagtgaccatgcgtgaacatgtagaagaacccagatatgtcaccaccgatgacgacaccgtctactcgctgctgtccaaacgagcagctcgcacgccggatgacatcatcgcggaatggcaggatgacaacacccaccaatggcgcagcgccacagctactgaaatgctgtcccgcgtacgcgaggtggccaagggcctgttaggacttggcgtcaaagccggcaccatggtgctgatttactcgcctacctgctatgagtggggtgtggctgatttcgcttgcgcggcaatcggcgctgtggttgtgcccgtctatgagaccgattccgcccgtcagaccgcgggcatcgtcgaggaagtcgatcccgccatcgcctttgccggcgacttccagcgcgcacagacgcttgagcagatccgtgtcaatcatccgggcatgaaatacgtgttcaatttcaaggccgatggccttgacgctgtcgttgacttcgggcatggcgtatccgatgagacgttggatgcggctatcgctcgtatcaaagccgatgatctgctcaccgtggtctacacctccggttccaccggcaagcccaagggcgcgatgctctccaaccgcaattacacgcacatcgtgcttaacggctacgagattctgcgtggcatgctgtacgacgacaaccgtctgctgctgttcctgccgctggcgcactgcttcgcccgctacatccagtacgtgtgcatcggtggctgcggcgtggtcggatacattcccgacgccaagcgactgctcgccgatatccgcagcttcaagcccacctacctgctgggcgtgccacgtgtgttcgagaaggtgtataacgcggcctcgcagaaggctggtgccggcatccaggggcatatcttcgcccagtcggtcaagcacttcgtcaagtggagcaaggatgagcaggccggtcgcggccattcgttcatcgagcgcatgcgccattcgttctacatggccacggtgggcaaatccattcgttccgctctcggaccgaacctcaaatggctggcctgcggtggtgcgccgctcaacgtggatttggcccactttttcaacggcatgaatgacatcaccttcatccagggttatggcatgaccgaaaccgccgctccgatgctcgtcaattgggaggacgacaacgagatcggttcggtcggcaagcctgggcctggcatgggcgtgcgtcttggcgaagacgatgaaattgagctgaccggcccgaacgtgttccttggctactacaagcagcccgaactcaccgcacagacgatgactgccgacggctggatcaaaaccggcgatctgggtcgtatcgacgaccgcggcttcaccttcattaccggacgcaagaaggacatcatcatcaccgccggcggcaagaacatcagccccgccccgatggaggatgtcatcgacacctgcccgatcgtggctcatgcagtagtagtcggcgacggcaagccgttcgtgtccgcacttatcgagctcgaccccgaaatgctgcattcctggctggaaggtcagggcctcaatgccgacatgacactcgccgaggccagcgacaacgacgcggtgcgcgcctttatccagcagtacatcgaccaggccaacgccaatgtctcccgcgctgagtccgtgcgcaaattcgcggtgctggatgaggaattcagtcaggagcacggcacactcaccccgagcatgaaagtggtgcgtcccaaggtattgcagcgctacgccaccgtcatcgaggaggatctgtacgcgcccaagccatccaacaagccgctgcccgccactgccaagatcatcgacagcacgctggagaccgtcaagaaatcctccgaatcggtcaagcaggcgtccgaacaggtcaaacaggcctcggaacagatgaaaaccagcgtgtctgattcgattgctagcgtgtcggagaagatcaagaagtcgaaggccgaacccgaagagggcgagaccggcgattccgctgacaatgccgctgacaccggcagcaagccggaccagccggctgacgagaagaatgaggagtaacgagaagtggccatccgtgagatcagggtcgtgcccgacccagtcctgcgcaccccctgcgatgagatcaaggaaatcaccccggccgtgcgccgcctggttgacgacctgttggaaaccgtggacgatccgggccgagcgggcctgtccgccaaccagatcggcgtgagcctgagggccttctcctacaacatcgacggcaaggtcggctacgttctgaaccccgtactcgaggagaagtccggcgagcagtatggcgatgaaggttgtctgtccgtgcccggcttgtggtacaagacccgtcgtgccgactacgctcgcgtgcgtggcatcgacttggacggcaacgaggtcgtgctcgagggctccgggctgatgggccgtatgcttcagcacgaatgcgaccacctcgatggccacgtgtatttggatcgcctggaaaaggaagaacgccgcgaagccctgcgctacatgcgcaatcgtcaggcgaagtagtccatactcggctcccactggctggagccgtcgaacgtagtgagactgagggtggttctgccggtaccgcccgtgactcccctcagtcgcctacggcgacagctcccctcagagaggggagcctgttttttttagtaccggctccgtgctattctcgaaactcgtgtgccacccggcaacggacgcagtcgctggtgtccagagccacccaatattgtcaaccggcacacaacaaattcgcgtcatgctcgcgacggcttgtgtcggtcggctgcacaactcgtgaaaccgggggagcagctgcacgcaggtgcgcatggccaggcaagaaccgacaatgaaaggtagtaataccatggctcagatcactatgagcgatatgctgaaggctggcctgcacttcggccaccagacccgtcgttggaacccgaagatgaagcagttcatcctcacccagcgcaacggcatccacatcatcaacctgttcaagtcgctcgacatgatcgacaaggcgtacgacttcatcaagaccaccgtggcccacaacggcaccgtgctcttcgtcggcaccaagaagcaggctcaggaagctatcgccaaccaggccacccgcgtgaacatgccctacgtctccgagcgttggctcggcggcatgctgaccaacttccagaccgtctccaagcgcgtcaaccgcctcaaggaacttgaggaaatggacttcaccgacgtgcacggttccggcctgaccaagaaggagctccttctgctcgagcgcgagaaggacaagctcaacaagcagctgggcggtatccgcaacatgaaccgcaccccgtccgcgatgttcgtcgtcgacatcaccaaggaagccctggctgttgaggaagctcacaagctgggtatcccggttgtcgccatcgtcgacaccaacgccgacccggacaccgttgagtacccgatcccggccaacgatgacgccatccgcggcatcgaactgctgaccagcctgatggctgacgccgtcgccgaaggtctgctggagcgctccggcgccaacaaggccgagggtgaagccgccgagcagccgatggccgcttgggagaaggaactcctgaccaacgaggctcctgccgaggcttccgctgaagccgccgctccggctgccgccgagggcgaaaccgccgaggcccccaaggccgagtgatgctctacgatgggaagtgcctgaatgagcgcttcccatcgttcatgggtaagcaaaatttctcaaggagaataatcaatggcagcaattaccgccgcactgatcaagcaggttcgtgaagacaccggcgccggcatgctcgacgtcaagaaggctctgaccgaagccgaaggcgacgtcgcccgcgccaaggaaatcatccgcgccaagggtatcgccgcagccggcaagcgtgaaggccgcaaggctcaggaaggcaccatcgcctccaaggtcgtcgagaccgccaatggcgagaccggctacgccgtcgagctgaactccgagaccgacttcgtggccaagaccccgaagttcgtcgagttcaccgaggaagttctcggctacgccgtggacgccgacgccaactccgctgacgagctgctcgaggccaaggctggcgacaccaccgtcaagctggctgtcgaagaggccgccgccctgttcggtgagcacgtcaaggtcggccagttcgccaagatctccggcgagcacgtcgaagtctacgctcacaagaagtccgccgagatgccgccgagcatcgtcgccatgatcgccaccgacaaggccggcgccgccgtggctcacgaagctgctctgcagatctccgccatgggcgccaagtggctgacccgcgaggacgttccggccgatgtggtcgagtccgagcgtcgcgtggccaccgagaagtccctggccgagggcaagccggagaagatcgttccgaagatcgtcgaaggccgtctcaacgctttcttcaaggaagtcgtgctgcttgagcagccgttcgtcaaggacccgtccaagaccgtcggcgacctgttcaaggaagtcggtggcaacgccaccgcattcgctcgtgtcgaggtcggcaagggcgaagaggagtgaacctaaggcttactccacgcgcttagcgtaatttcaacgaaacgccatccggttattcaataatcggatggcgtttcgctattccaagggtgtcgttgctagggggtgtcgtcgtaaaccgatacgcttgtctacggataatttcgcactttcggttttgagaaaggcacaatatgactgatagcgacaatccgcgcagagttctgctcaagctttccggcgaagcattcggtggtggcaaggtcggcatcgatacccaggtgattcgtcgcattgccgaggagatcgttccggccgtacaacagggtgtgcaggtggccatcgtggtcggcggcggcaacttcttccgcggtgccgaactgcagcaggccggtatcgatcgttcccgtggcgactacatgggtatgctcggcacggtgatgaactgcctcgctctacaggactttctggagcaggaggggcaggccacccgcgtgcagaccgccattaccatgggacaggtcgccgagccgtatattccgctcaaggccatccgtcaccttgaaaagggtcgcgtggtgattttcggcgccggtgccggcatgccgtacttctccaccgacacggtttccatccagcgttccctcgaaatccactgcgacgaggtacttatgggtaagaacggcgtcgacggcgtctacaccgccgacccgcgcaaggacgagaacgccaagcgttttgaaaccctgagctacaatcgcgccctcgtggacaatctggccgtcatggacgcctccgcactgtccatggcccgcgacaacaagaagcgcatccgcgtcttcggcctcgaagagccgggcaacgtgacccgcgccctcgtcggcgatgaaatcggcacgctggtctccaccgccgaatcgcgcgtggccgagtaagccgcaaacgcccacaatcgaatcaagcgttcatagacgaacaacactgacgaacaccaacacacaaggagtgaatatgtctcttatcgaccaggccaaggaacagatggccaagaccgtggaaaacaccaaggaaaacttctccggcatccgcaccggtcgcgcaaacccggccctgctcaacggcatcaccgtggactactatggtgcccccaccccgattaaggccgtcgcctccatcggcgttcccgaaccgcgcaccctgtccgtcaccccgtttgacgcttcccaggccggtgccgtcgaaaaggccctgcgcaactccgacctcggcatcagcccgaaccgtgatggcaacgtcatccgtctgaccatgccggaactcaccgaggatcgtcgtaaggaatacgtcaagctcgccaagggcaaggccgaggatggcaaggtcgccgtgcgcaacattcgccgtaagaccaaggaaaccatcgacaaggccgtcaaggacggcgagatgggtgaggacgaaggcgatcgcctgctgaaggatcttgacaaggtcaccaagtccgttaccgacgagatcgatactctgctggagaccaagcagaaggagatcatggaggtctgattcagaccaggtccggagaattatggaacgcaacgaacaaccccatgaagaggccgaggagacgctcgaccagatcaacaagaagaccggccgcaacatgccgcaggccatcgccacaggcgcggcactggtcatccttattgtcgcgtgcctgctgctcagcgtcgacctcttcgtgctgctggtagtcgtgttcatgattctggcgctgtgggagctcagggtggacttcgccaccgtgggcctgcacctcccggtgtttatgctgtggctgtgctcgtccttcaccctcattgccacctactattccccgtaccatctcatcacgatgtcgctgagtatcatcgtgtcgattattctggtcgccatcgcggccagcgcaaaaatcagcgtcggcaaccgcctatctctggcggttgccggcaaactgtccaacacggatgccagcgcgcgcctcgaatcctcgtttaatcatgagggcggggaacagcatcattcccggctcagccatgtggctgtgtccgtgcttaccgtgttgtatattccgttgttggccagctgcgtcatcatctcactgacttttaatgggcatccgattgcacacgccatcatgctggtgttcctacccgccctatccgatacgggcggtttgtttgccggtgcctggctcggcaaacacaagctcagcccgcgcatctcgccgaagaagtccgttgagggccttgtcggctcgatgctcttcgccatggctggcgcatttgccgtattcgcatgcacgtatgatgcctcgaaatgggccactcgttggtgggtgccgatcgtggcgggtattctcatcggtgccgtgggcacgttcggtgatttgtgtgcttccatgctcaagcgcgatatcggtatcaaagacatgggccatctgctcaaggggcacggcggtgtgatggatcgtgtggattccattttgatgagtgcaccgttcacctgcgccttgctgtggatcaccggactgtgattcgcatgtctcgtgcatgaacaatgtggcatcgtgtgtatatcgcacggtgccacatgccatatatggggaaatcatcgttcaatatgcgttcgctatgggctaagacatgggccatctgattcgtatgcggcacgccgtatggtggattctgatatttctattgcatgtttgactattttctgatattgagagcgaagcgaacccatcatgaccacacagcatcctgacactccggaaaccggcattactcccggcggcacatcaggtgccttccgtgacgtgctatccaaggaccatgcccgccgtggtaagccgccgctgcactttgtggatatgacgcccgagcagcgcgtcgagaaagcggccgaactcggattgccgaagttccgagtcaagcagctcgccaaccattactttggccatttcgatgtgaatgccgccgaattcactgattttccggcagccaagcgcagcgaggccgccgccgcgtttttcccgcagctcatcaccgaggtgacccgccaagtggcggacgaaggcaccaccatcaagaccttgtggaagctgttcgacggctccctcatcgaatcggtgcttatgcgatacccgacccgcaccacgctgtgcatctcctcgcaggtcggctgcggcatgggctgcccgttctgcgccaccggcaagcttggcctgacccgtaacatgtccaccggtgaaataatcgaacaggtgcgtgtggccgccaagatgatgcgcgacggcgaagtggccgggggagagggccgcctgagcaacatcgtgttcatgggcatgggcgagccgatgggcaactacaactccgtgctgtccgccgtacgacagatttccgccatgcctcccgaaggcttcggcatttccgcgcgcaacatcaccgtatccacggtgggcgtggtccccggcatcaagaagctcactgccgaaggcattcccgtgcgtctggccgtttccctgcatgcccccagcgacgaactgcgtgacgagctggtgccgatgaacaagcgtttcaacaccgcgcaggtgttggatgccgcgcacgattattggctggcctccaagcgccgcgtcagtatcgaatacgcgctgatgcgcggcatcaacgaccaggccgagcatgcgcagttgctggccaagaggcttaaccattacggcgacaactgggcccacgtcaacccgattccgctcaaccccatcgagggctcgaagtggaccgcctccaagccggaagacgaacagcggttcctggagatcctgcaccgcgcgggcatcaccgccacactgcgtgacacccgcggtcaggatattgacggcgcctgcggccagcttgctgccaaggagcggtagtttcggtgacggaatcggcctgcggcgattccgtcacttcagcgcatccttgattgcgtccacgaagtagtccagatcgtcgggcttgcgggacgtgatgagcttgaagccgttggcgtcgtccacgtgcagctgctcgtcgacgtaatggccgcccgcgttctcgatatcagcggcgatatagcggcagggcgcggcggtcttgccagccaccagacccgcgttgaccagcagccacgcgccatggcagatcgcggcgatcggcttaccttcgtgcgcgaactcctgcgccagcgtgatcgcatcctcattgacgcggatacgatccacattgcaggtgccgccgggcaccaccagcaggtcgtagtcggcagcctgcacgtcggacaggcgcgcgtccggggtcagcgtttcaccttcgtagcggtcgtgctgcaccgtctcacacgggtccaaggtagtggcggcaagcgtcaccttggcgccggcggccttgagatcgcgcagcgggcgcgtcagctcggtctcctcgataccccagttgttgacgatgatcagtaccttgctgttttcgacagccatgccaatctccttgattcggcggacaacttccacgagccattctctcacgccgagcggctgccataccggtgctcaatatgatgattctcatattccagaaacaggtgcggcgcatgtaacgggcggtaggtagtctgaaggactgtaatgcaaagccgaacaggggagtgaagcatgtcgttggcggtacgagtcatcccgtgcctggacgttgacgccggtcgcgtggtgaagggtgtgcatttcgagaacctcaaggacgcgggtgacccggtggagctggcggccgaatactatcgtcagggagccgacgagatcaccttcctggatgtgaccgcatccagctcccaccgcaacacgatgattgacgtggtctcccgcaccgccgaacaggtgttcatcccaatgactgtgggcggcggcgtacgcacgcccgaggacgtcgactcactgctgcgctgcggtgcagacaaggtcggtgtcaacacggcggccatcaacgacccgtcgcttatcagccgtgtggccgatcgtttcggcaaccaggtgctggtgctctccgtggatgcccgccgcgaaaagggtgagcagcatacgcagtccggttttgaggtcaccacgatgggtggccgcaaatccaccggtattgatgccatctggtgggtcaagcgcgccgagcagcttggcgccggcgagattctgcttaactcgatggacgccgacggcaccaaggaaggctttgacctcgagatgattcgcgccgtgcgcaaggaagtcaagattccgatcatcgcctccggcggtgccggcaaggtcgaggacttcccgcccgccatcgaagcaggtgccgacgcggtgctggctgcatccgtgttccattacggcatcctgactatcgccgatgtcaaggcggaactcaagaagcacggctacaccgttcgctaaacgaatacaccttgctcccgctgggcgaacaatccagtgaattgttcgtggcaatgcgctatgcgcacgtcgcacataatccgggagctgtcagcgaagctgactgggggtggtccacaaaaagaagataggtatgacagacactacatacgacaattccactgaactcgatccccgtattgccgcacgcctgaagcgtgatgccaaggggctggtcgccgccgtcatccagcagtacgacacacgcgaggtgctgatggtcggctacatgaacgacgaggcattacgccgtacgctgaccaccggccgcgtgaccttctggtcccggtcccgtcaggaatactggcgcaagggtgatacctccggccatgtgcaatacgtcaagggcgtgtccctggattgcgacggcgacgcactgctcgtcgaagtcgaccaagtcggtgccgcctgccacaccggcaagcgcagctgcttcctcgaaggcggccccctgcccgtggtcgaaggccatcgcccggccgagcagtagaacgggctttcctgactgggggaagccgagcgaccgcgtactatgaaacaagacatcgagttgtaagcaaaggagcgaatatgagcgaatgcagcgtcaaacacctgaagtggggcgccacctggcccagtcgcgaacagttccacgaactggccgacgccggataccgtgtgattccgattgtgcgccgtctgctcgccgactcgctcaccccggtcggcttctacgagcgtctcgccggcggccgatccggcaccttcatcctcgaatcggcggaatacggcggcacgtggagccgttacagttttatcggcgtcaactcgatggcccagctgcgctccaacaacggtcaggccgactggctgggcaaggtcccggtcggcgtgcccgtcaccggtgacgtagtcgaagtcgctcacgccacgttgaagactctgaaggccccgcatgtggaaggcctgccgaacctgaccagcggtctggtcggcacggtcggctgggatgccatccgccactgggaaccgaccctgcgcgccgaagctccggacgagaccggccagcctgagaccgtgcttgccctggccaccgatatcgccgtggtcgaccacgtatccggttcggtatggctcatcgccaatgcggtgaatgtggatgataaatccactcgcgccgacgctgcctacaacgaggccgtcgctcgactcgaccagatgcagcgcgatgccgccaccccggctccggacgagtctcgcgtcaacatcctggacgaaacggtcgcccaacccgagctgcgcttccgcaccgagaagagccactacgagcaggccgtcgaacgagccaagcagtacatcgtcgacggcgacgtgttccaggtggtcatctcccagcgcctcgacatcgattcgcctgctgacccgttcgacgtgtaccgtgtgttgcgcacgctgaacccgagcccgtacatgtatttcatggcgttgaccgacgctcagggccgcgacttcaacgtgatcggctccagcccggaaaccctcatcaaggtggacaacggccacgcgatgaccttcccgattgctggatcccgccctcgcggcgccacccctgaggaagacgagaaattcgccaaggagctgcttgccgatccgaaggaatgcagcgagcacatcatgctcgtcgacctgtctcgcaacgacctgagtaaggtgtgcgtgccgcagtccgtggaagtcgtgcagctcatggacatcaagcgtttcagccacatcatgcacatctgctcgacggtcaccggcaaggtcgacccctcgctgaccgcattcgatgtgttcaagtccgcgttcccggccggcacgctgtctggcgcgcctaagccgcgcgcagtcgaaatcatcgacgagttggaaccggccgaccgcggcatctacggcggcaccgtcggctacttcgatttctccggcaacatggacatggccatcgccatccgcaccgcgttcctgcgcgaccatgaggcgagcgtgcaggccggtgccggcattgtgctcgactccgtgcccgccaccgaatggcaggagacgcgcaacaaggccgaggccagcgtcgagtccatccagatcgccgcccagttgcgcgaactgtaacgttcaacgcatagcgatgcccccgctgacagaagttgtcggcgggggcatcgctgtctgtacgttagtgggtttcgcccatgatgtcggtggcgtcggtttcggtgctcacagcggcttcgatggcagcttcgataccgtgcgccatggtcgcgatcaccataccgggcgtcgcattcttcaccttgccgatcagttgcgcggctgcgtatggacgcatgagcgtcggctgagcccggtcggcatggtgttcgctatgatggacagtcggactttggtaagagacagtattcgtaacaggcaagtaggttattcatggctattgaggtgcagggacttgaaattcagatcggcgcgcgcacgctgcttcaccccaccaacttccatgtggccaagggagacaagatcggtctggtgggccgcaacggcgccggcaagaccacgctgacccgcgtgatcaccggcgacatgctgcccaccgccggcaaggtgcgcgtctccggcaagctcggctacctgccgcaggacacgcatgcctccgatcccacacagaccgcgctcgaccgcatgatgagcgcgcgcgacatcgccaccatcatcaaccgcatccgcaaggccgaaaaggatatgaccgacccggatccggacgtgatgagcaaggccatgacccggtacgacaaggccatgcaggacttcgacaaggctggcggctacgcggcccagtccgaggcgatctccatggccgcctcgctcggcctgccgcaggaggtcatggagcagcagctcggcacgctctccggtggccagcgccgccgcatcgagctggcgcgcatcctgttctccaatgccgacaccctgatcctcgacgagccgaccaaccacttggatgccgattccatcgaatggctgcgcggctacttgaagaagtacgagggcggcttcctggtcatctcccactccaccgaactgctggacgaagtggtgaacaaggtctggcatctggacgcgcagctcggccagatcgacatgtattcgcttggctggaaggcctacctgcaccagcgcgtggtggacgaggagcgccgccgccgcgaacgcgaagtggccgagaagaaggccgaccgtctcatgaagcaaggcattcgactgcacgccaaggccaccaaggccgtggcggcgcagaacatgatgcgccgtgccgaaaagctgctggaaaacacctccgaggcgcagaaggccgagaaggtggcggacatccgtttccccgagcccgcgccctgcggccgcacgccgatcatggccaaggatatttccaaggcctacggttccaacatcgtgttcgccggcgtgaacctggccatcgacaagggctcgcgtgtggtgatcctcggctacaacggtgccggcaagaccaccacgctgcgcctgctggcccacatcgaggagccggacaccggttccgtggaatacggtcacggctgcaagatcggctacttcgcgcaggagcacgacaccttggatctgaacgccaccgtgttggagaacctgcagcatgtggcgcccgagctcgataacacgcaggcccgttcgattctcggctcgttcctgttctccggtgacgacgcgatgaaaccggctcacgtgctttccggcggtgagaagacccgtctggctctggccacgctggtcacctcgcgagccaacgtgctgctgctcgacgagcccaccaacaacctcgaccccgcttcccgtgaggagattctgaaggccattgccaagtatgagggcgccatcgtgctcgtcacccacgatgagggcgccgtcgaggcgctcaaccccgagcgcgtgctcctcatgcccgacggcgacgaagacctctggaatgattcgtatctcgaactcgtagctgaagaatagtagtaaactcgtagccgaagaatagtagtaggagaggtctgccatgccaaccacaacaggtaagaaaatcgccatcgtcaccggcagcgcgctgggcttgggctacgagctcgccagccagctcatcgccaacggctggctggtggccggtgtcgacttcaatgccgaacgtcaggccgaactgaccgcgcagtggcccgatgactcctaccgcgcctacgtcggcgacatcaccgacgaagcgttcgtgaaggaatccgtggcggatatcgccacgctcggccacatcgatttgctcatcaacaacgccggccagccttcgttcaaggtgcccaccgcctacgaggccgccgacgtcgacaaatgtctcaagggactcaaaggcatgattctgtggacggtggaaaccctcaaggcctgcggcgagcagaacgtgaaaatcgcccagattatgagcaccgccgccacacgcggcaacgcgaacgaaagcgtgtactgcgccaccaagtggggtgagaaaggctacaccaagagcctgcaggccgcatacaagggcaccagtgtcaaggtggtcgccgtctatccgggcggcattgataccgctttctaccgtgacagtcgcgactacgtctccgaggccaagcagcacaccttcatgcagcccggcccgctggccgaagtcatcctcttcaacctgatcaacgaggccaacctcaccgtcaccgacatcgagatcaaccgcaacagctgagcctgctagtctgagatttcagcgccttggtacatacttggtgccaaggcatttcgcgtgtggagagcgaatgcacatcagtgacgatgagtttgaacgggccattgaacaggtgttggatgatttgcctgaacggtttgcgcgggtgctggagaatgtcggcatcgtcgttgcggacgaacccaatgagcgcgaactggctacaatgagcaatccgtgcggtgagctgctcggactgtatgagggcatacccgtcacgaagcgaactacgggctacagcggcgtgatgccggacgtcatcaccctgttcaaggggccgcatgaacgcgtatgctcaacgcaggccgagctgcgccaacggatccgcaaaaccgtgttgcacgagatcggccattttttcggcttcgatgacgagtatctgcactcgcacggctactgaagcgatgctagtttcactagcggggagccgccatactgccgtatgttgccaggtctactgcaagtggtgcaacgcacggatgatggcgcaacggtcctcgacggttccctcgttggcgcacatggtggcgtaccaacgcggattgcgcaaggtctcggtgccggtggcctcatccgtggcgacgagcgtgtgcagatcgttggcgtactggaaatgcaggtggctgagcagcccgccctcggcgaacgccttgcgcgaaggcagcggattgatggcaagcagccagcggaacgggctgtcttcggcggccggatcggtggtgtggaacacgaaggtgggggagccttcgagaccgtgctcgatgacatggtcgatggtgtattcgtaggtgtcgaggctggtgtcgtcctcggcgaaccattcgatggcgagcgcggcatcgtccgtggagccggattcggcggccggctcgttcacacgccagtagccgatatggatgatgttctccgggctggtggtggagcaagccatcgaccagaacgtcctgatgccgcgcgcggccatcggggccatcttcgggttggcgagcaccgcctgctcggcggcttcccaggtctgctggatggcggcgtcatccgaatcaatgtaatgctcgaagctttcccattcaccgagccagtcggtgatgtcgaaggccgtggaatccgtggtgttgctggcggtcattgcgcgttcctttcatgggtggatgtggtggcgaaattggtagaggcattagggctggggctgctggcatctgggttactgacatgcgagccgttgttcccggaatcgtcggcgccaagattgacaatgcggtcgcaccagccggcggcgagctcctcatcgtgggtgaccacgagaatcgccttgccttggctcgccagttgccgcagcagttcgccgacctgctccatgtggtagcggtcgagtccgctggtgggctcgtcaaagatgatgaggtccttgccgcacatcaatgccgagccgatggcaacccgctgcttctgcccgccggacaggctcatcggatgccgttcggcgaacgctgcaaggtcaagatcggccatgacctgattggcttgagcggtgatgccggcatccgtctcgtcgagtccgatgagcagttcctcgcgcacgctgtcggagaacagttggtagttgacatcttgcatgactaggaatccggcgcgggtcaggtcgcgcggtttcgcgggcacgccgttgagctcgatgcggcccgaaacaggcttgatgagtccggtcaacgtgcgcacgagcgtggtcttgccgcagccgttgttgcccatgagcccggtgatttcgccggcacggaaccgcaggtccgggatggcgcgggtgaagccgtccttgcctttgtatccgatggtgaggttatgggtgccgagcaatactgaagtgcactcatccgcggccgggcttgaagccagcgccgcaatccggcgtcgatacggttgcaggtccaacgcccgcaatcccatggcggccacgcagccgggggagagggacaggaattcatcggcctcgtaatcctgcacgatatgcccgccgtcgaataccacgtaccggtcggccacgccgttgagccatgcgagtcggtgttcggcgattacgatggtgagcccttcgtccttcatctgctcgatcatggcgcgcatgtccgcgatggcgttcgcgtcgagattgctggtcggctcatccaataccacgaccctgggccccagcatggtggccgccgccacggcgatgcgctgcttttggccgcctgacaggtggaagatgctgcgatgcagcagatgcccaatgccaaagcgctcagccacggccgtgatacgacgattgatgtcctcggccggcagccctatgttttcggccgggaaggcgagctcgtcggtgacgttcgcgttgaaatactgggttttcgggttttggaacacgctgccgaccagcggggtgagccggtcgatcggcacggtctccacatccagcccgcacgtggtctggttgccggcgaacgcaccatggaagaatgaggggatgagcccgttggcaacgcgcgtatagctggttttgccgcagccgctcgccccgcacagcacgatgcactcgcctgcgggcacggtcaacgtgatgtcgcgcaatgccggctctgcggcatggtcataggtaaaggagatgccacgggaggcgatggttcccgcagacgtgtcgagtgggccacccttgccggtcccaataatggcagttgcattcggctgcgattggtttccacccatcagatcacccccgcgatatcgagcgcgagcggcaaagtgaccacaatcatgaccagccagtcgaccacggtcatacggatcagcgtgcgcgaggtgtgctcgccctcacgcccgagccccttggtcagtgccgccaccgacaggtcctgtgccacattggtggcgttcatcagcagcggaatcagaatgtattccaacgattgggccgggtgacgaaccagcccccatccgccggaggcgatgccgcgcaacgccatcgcattgcgaatctgccggtaatcctcggcgatggtcgggaagaagcggatgaccaccacacagggaatcaccacggcctcaggcacgcgcatacgccgcatcgcgcagatgaacgcgctcgcggacgtggtggtgaacgtatacgcgccggtgatgaaacagggcagcatcatcgtgacgcccacggccagcgcggagaccacatgcagccacggcagtcccagggcatcggggtcgagcattcccagcgcggtgagtacggcataggtcacgccgaagttcaacgcggttcgccatcgggcggccgccagcaggggtagcaggaacagcacgaccatgacgatttgcgtggcgagccctacatggaagaacagcatgaggttcgccaccagcagaaggtagagtttcgcgcgcggatcgagcgtccggcgggcaggattcatcagacgataccggccttgatgaagtgcttcttcatcatgcgctggccgaaccagccgccgagaaccgcgcacaccagaatcgcgatcatcgagatgaagaacgtgccggtgttgatgttgacgaatacgccgtcgatgtaggctgcgtccttgccgcgcgcctgcaggctcgccacgtaggcgtccttcatgaaccacaggggcaggatcgggccggtcaggccgtaggagaacaccacgtagctgacgagcagtagcgccttgctcttatacttgccggcgcgcgcgatgaggtcggccgccaccgggaacacgatgctggcgatgaacgaaagcacgaaatgcccggagatgaacaggaacagtccgatgatcacgcccatgacggtgatgccgccgaatttgccgaggcgtgcggccagcagcatgtacacgcagccggagatgagggccgtgatggcgggcaggaagatggagccgaagccgctggtgaacagggtgctcaccagtgtggcgatgcataccatcacgaagtacagggccgcaaacacgccgatggtgatgaggtcggagacctccagtttgccggatttggcgggcttgttgagctggtcagaggtttcggcgggcgtgttcggtgcggtcacgatgttttccgtttcgtatgcattgacaatattcctctcgccaatctaacgatgatttcccgcagaggcaatagtctgtctgtgattttttagcatggcttggcagattctagtggtggttgcaacacctgaggtttgagcggccttccatggtcatgttgtcggttgttgaggttatcacgcggcgtcgagcagttcgatgatcttctcgcttggtttcatgaacccgagggttttgcgtggccggtcgttgagttcctcggcgaccgcgtcgaggtagtcctccgggtagacggataggtcggtgcctttggggaagtactggcgcaggagcccgttggtgttctcgttggtgccgcgctgccacggggagtgcgggtcgcagaagtagacggccatgtccagcgaggcgccgatccgtttgtgcagggcgagttccgctccctggtcccaggtcaggctgttgcgcaggagtttgggcaggtgctgcatcttgtcgatgatggcctgctggacgtgttcggcgtcgtgcccgtcgggcaggtgcagcaggatcgtgaacctggtggtgcgctcgacgagcgtgccgatggcgcttttgttgcggctgccggtgatgagatcgccctcccagtggcccgggaccgcccggtcctcgatctccgggggtcgctccgagatcatggccatgggttcgcggaaacggggtttgcggccttggccgccttggggtctgcgggcggttcgcccctgcctcatggcgcgtttcagctcctgcttgagttcgcccctggcctgcaggtagatggcctggtagatcgtctcgacgctcgcgtgcatatccccattatccgggaagtccagcctcagccggttggctatctgctccgggctccaatgcctgcgcaacccggcggcgatctcgtcccacagtcgcgtgccctcggccgccttgcgcggtttggggcgtttgagccggtccgcggccttctgctgggcgcggtaaggctcgtaaccgccggactcgggattcctgttgcgctcgacctcgcggctgaccgtgccggggtcgcggcccagcaggcgggcgatggcgcggatcgaatcgcccagacgcagacggtccgcgatctggatgcgctcctcctggctcaggtatcgcggatggagggtcttgggtttgtccatggtggaacgataccagtccaccaggggtttctcgttccttcccgtggcgcgcgtcctgccgttgcgccacgccttgccggtgcgtttcgagacgccgaccgcgtgcgcggcctgggtgaagttcatgccttcctcgtccagcaggcgcacgtactcggcgcgtctcgcctcgcacatcagcttcctcgtcggatattcgacgccgttgaacgtccaacggtgttccccgccacggtcttcgtttcggtggcttctggtcacctgaccctccttgcggtaggtcaggtgttgcaacgatcactagaacccgcccttggctcccctccctgtgggggggggcgaagggcgtggcgcgggcggggtgtggttcgcggctatcggctagtatggtgcggtcacgacagagggaggcatgctgtggccgatgtgatgcgggagctggaacggctgcgaccggtgtatgagacgggcgtcctgcggttgctgttgcgccagaacgcgatgctgtacgtgtcgctgctgcgttccacgttcgacccgctcaccggcgagctgccgcgcgagaccgtggaggagcggttcgcgcaaagtctgagcagtctggccgacgccggcgagtatgcgccgcgcgaggaccagaccttcgccgaggccgcccatcagatcctcgccgacctgacccgtgaaggcgaaggcgactacgcctggctcgccaactcgcatgatgcggcctcacaccgattcctctaccgtttgacggcccgcgcccaccgcgccatcgaggcgctgagcaggctcgaagacgaatcacgcgccctgtccggcgcgcaggccaacagcatcatcatggaaatcgagcacgcgcgcatgcagctgaccgccgaccccggcgagcgcatcaaactcctcaaccgtgaaatcaaggaacgcaagcacgagatcaaacgcatccaacagggcaagcagcatgccacgctgagcgaagcccaggtggaggacgtgatcgccgtgatccacaacacgctgcgcggcgtgcccatcgacctgcgcgaactcgtgctcgacgagcgggacaacggcgacgccttgcgtcggcgcatgcaggccggcgacatcagcgtggacgagaacctgacccgctaccacgatgaataccgccgctcgttccgcgaatcagacagcggccgccgcttcgaggacgccttccaggtgatcatcaccgacgagggccgccagcaaatcgacgaagccctgcgcgccatcgccaaaaccccgtatctggccggcgaatccggcgtgctgctcggccagatccgcgacgaactggcccgcatctacgacggcatcgaagccgtgtgccgccagatgcgcgtctccgacgaggcgatcagccggctcgtgcgccagcaaaccgacactcgctaccgtacgatgctcacccgcttgaaccgactgtacgcgcgcctcaacgcggatgcgaaaacccatatgggagacgcctcgcgcccgtacgacacggccacctcggacgcgctgttcgcgccattgccgatgcgcccggccaaatccatgacccgcgccaccgcacccggcctgagcgacctcgccgccgaagccccgcagtcgactccggtggccgatctgcgggacatggtcaacagcggcggcccccgactcctgcgcatggtcagcctcatccggcgcaacccggtgaccgttgacaggtccgatgacaggcccggcgcaaccctcgtggacatcgccgccagcttcaaccggctgcccgaaagcgaacgccgcgaaagcgagatcgtcggcttcctgggcgggctgggagccgtaagcggcaacgccatcgccgacgagccgtccactgacggcgtcggcgtcggggtcgacagcgacatcgccaccgagccggctccggcgcagcgcggcgatactgcgacctggcattgcgtatcgatcgacggcgagccccggaactggatcactagaccggtgctggccgacatggacgagctgagcatcattgtggaggaaggatgaccgtggccgaggaacacgaggaacacgaggagcatatggacaacgccaacccgtacgccctgttcgaaggcgacatcggcgacatgccggccgaggcacgcatggccgccatcgccctcaaacgcgaccgctatatcagcgggcccacctacgacaccgtgctcgacaaccgcgacgccgtcgtacgctccctgaacaacgacctgctcgacttggtgatcaacgaacgctaccgcatcatgtacgccacgcccgtggccggcgacgacgtgaccctgcgctcgctcaaaacccgtgtcagcctcaaacgcgaggaggccgcgctgctcgccttcctgcgcatccgcgtcctcgaatacgagaacgtgcacgccgaccccgccgactggctcgtcagctttgaggagatccgcgccgcgctcgccaccggcgccggctatctggccgcccgcaacgacgaggaaggcgtggcaaagcagatcggcgccatcgtctccgcgatgatcacctacgggtatttggtgcgcctggacgacgaagccatgtaccagatcacgccgctcgtgcccgtggtgctcgaccgcgaactggccgacacctggctcgacgtcgcggaacacggcgacggcgacacggaagatgacgatgacgacgagaagggagccgaatgatgcaggcgacagacgtgcagatgatcgcggaccggtggatgctggaatcccgccgactcatcaactggggctcctatgagggctaccacgaattccgcccctccacggaccacaagctgccggtgaccctgctcgccggtgccagcgaatccggcaaatccacgctggtcgacgcgcagatctccctgctgtacccaaccggtacgccgttcaacaaggcctcgaactccggccgctccgaacgcagcgactacacctacctgcgcggcatggtcggcgtgggcagcaccgaaaccggcgacgagccgctctacctgcgcggccgcgacgagaacggcgcaccgcaacccgtgtggggcgccatcgtggacacctatcgcaaccagaccaccggccaggtgctctcctgcgccaaattcctctacctgatgcccggcgacggccgcggcgacgtgcgccgacagtacgtggtctggggcaagcccgtggaccccaggcgcatggaccaataccgtgacgccccgttcacgccggcccagctcaaagccacctaccccgactgcctcacattccccagcgccgaagcgttccacacacacatctggagcgcaatgggcctgagcgaggccgcctgtcgactgctgcacaagatccagtccgccgacgcgccctcccggctcgacgacatcttcaaacaaggcgtgctcggcgtgcccgaagccctggacctggcccgcaccacggtcgaggactacgaacgttacgacgagaacttccacgccatggacgagaagacccgccgcatggacacgctgcgcggcatccaacaggcctacggcgaatacgccgccgcacgcggcaaggcccgcgccttcgaaccggtcaagccggccgtcgacggcacggtaccggccgtgctgcgcgactgggcattggcccgcatgcgcggcgaagtcgccgtccaactgcccgccgaccgcgccgaacaacagaacagcgaggcggaagccaagctgctgcgccgccgaaccgaagacctgcgcacccgtctcgacatgatccgcggccagatgcagggtctggacggcggcaacctgacccgactcgaactcgaactcgaccaggcccgccgcaccctcgaagacgtgcaagccaaccgaacacgaatcgaacaaacgttcgcatccatcggcgagacgctgcccggcgacgaacaagcctggaacgaacgccgcatcaacgccgtgaacttcaaacgcgaatacaacaaacgagacggcgaatgcgaggaagccctcaccgccgccatcaacgcgcgggccggcgcacgcggcgacctcgaacgactgcaacgcgacttcgaccggcaacgctcccagcgcacccgcatctcccagcagatggacgaaacccgcgccatgctctgccgcgccaccggactcgcccccgccgaactgccgtacgtggccgaactcatggacgtgaacgaacacgaggaagactggcgtctcgccatgaacgtcgcctacgcgcccatcgcccagaccatcctcgtcgacaagcgccacgaacagggcttcgccgccaaagtcagcaccatcgacccgcgcaccatgccccgacgcacctggcagttcgtggacaccgcacgccactacgacgacaccggcgcgcacgcgaacatactcaccggagaacaggacggcgactggctgtccggcaaactgcgctaccgcgacgactcgcccttcgccgactggctgcgctcgcagacccaggacgaacgattcgacgccctatgcgtcaccgccatcgacgacaccgaccgcaccaaccgtcaggtgcaggccgacggtcagatcaaatccggcgcacgcggccagcacggcaccaaagaccgcgcccaggtcatcggattcgtcaacgaaacctacctcaacgcgctcgcagcgcaggtcgacgccgcccgcaacgcgctcagccaagccgacaccgactacacggccgccaaaacacagtccgataacctccaccgcgaactcgaactggccaaccagctcgcctacacgtcctgggagcgcatcgacatcgccggcgcgcaacggaccatcacggacacgcaggacgccatcgcatccatcaaaaacgatcccaagctcgccgaactcgccaaacagcgcgacgaactgaacgccgaactcgaccgtgtggaacgccagcgcatcgaatccgaccaggccgcggcccgcgccggcagcgccgtcgaagcggcgctcatctggctgcgcgaccatgccgacaccggcacgacggacgccgccggtgccaccgccgacaatgacgatgacgccgcgtccggcccgctgccggacgaagtcacggcggcgctcgccgaatcctacgacaaccgattcgccggactggcggacgccgccatgcgcgcgcacatgatcatcggcgcgggcgcggcaggaacgcaggcgccgggggagagcttccccgaacgcaccatcgccggcatcggcaaggacatgacctcccgcatcaatctgctgaacggccaggccgacgccgcgcgcaccggcgtcgaatcgaaaatgagcacctacatcgcgctctacgcggccgacgacgactcgctgaccgccagcgtggaggactaccggtactatctcgacgaactcgccagcctcacccagctggccgcggttgccgccaccgacgccgaataccggcgctgcctcgaacagctgctcaggagcttcctgaccatcaaacgcgccatcgacacggatgccagtgacatccacgaccagcttgaccgcatcaacgccatgctcaaaggccaacagttcggtcccaagcacggcagcctgtccctgcacgcggacgtgcgccgtcccgagcgcgccttctggacgcagctcatccgcgtcatcggcaccctgaacgattggaaatccgccgacgtcaacgattccgacgcctcgcgcaaggccttcgcggcctgtgcgccgatggtcgggctgctgcgcgccgaactcgcgcaggtcaaggacacgaacggcgtgaaaagctacggcgcccgcaatctcgacccgcgctgccgctcgtccttctacgccatcgtgcatcatgccgacggtccggacgaacgcatcacctccaccggtggtcgctcgggcggcgccttgcaggagctcacctcgttcgtatacggcgcggcgctcatctacctgcttggcggcggcctgaccagcgagccctcgtacaccacgctgttcctcgacgaggcgctcatcaaggccgacggccgttacacgcagcgcgccctcacggtgctgccgcgcctcggattccaggtcatcgtctccgccccggaaagcaagaccggtgaaatcctcgaggtctccaccaaggcctacgtgacctacaaggaccccgacaccggcctcacctccctgcgcgaggccgtgctgtaccagaatgacatggacgatgaatcatcgtcggatatattgaaggatgacggggttgccgaatgagcagtcccggcgtcgccggtattaagacgattcggttcgactcgacgatgttcgaaagcaggtgatgggaactatggccggcatgaaagacatcgctgcgatcaccacatgcgtgaagaaacatatgcgttcacatatgtacgacatcgaaccggcatggccgtttcccgtgccggtgggattgccggaccaagcatttttggaaaccaatgcgattgcagtgcatgacaacaacaatgagatacggcaatgggcaagcaagaatggttgcgaaatcataaccaagcatcgcaccataggcacctctgtcgagttgatctccaaagtcgtcgttcctgacgaatcaatagccatgcgtgtggttggtcgtacgctggcggcggaatatcgcgaagcgcaccgccgcatagcatgtctggttgctgcttgtgacgttgctccggaaacaatcgaatcggccgctcgcatgacaggccatgaacagcctgacgacttcgatctgcttgtcagcgcagttcgatatttcaggcatcatgacgtgaccggtatgacgccgcgacagattccactgacaggattcagcggcaaatggctgaatgagtcaaaaaccaatcgtcgtaaggccatttgccgactgctcggtgtcgaaacgttgggtctgtcaaaacggccgaccgaactgcggttccgttatctcgatccggtccgcgacgatgctgagctcgaacgcatcatatggtgtccgtgggaaggcgaagcgttatccggcattaaatatgctgtcatcgttgagaacaaagacacgtatcagactatgccgccgattgcgcagggcatctgcatatggggttctggtcgcgctgtaagcgatgctgtacctgcggttcctgcactgcgtgacatgcgtatcgtgtattggggtgatatggatgcggatggactggaaatactttcgacattacgtgaatcaggtatcgaatgcgactccatcctgatggattgcgatgcatacgatcggtaccacagatttggtaccgatcgtactgaacgcagcgcgaagattgctatgcgggagcctaagccgacgcccggccttcaatcggcggagcgacgtctttatgaacgactgtgtgctgacaaaacaatcgcttatcggcgtatcgaacaggaacgcattcccatgcgtgatgcagttgacgaattacgcaagcttggcatccccgtggagtccattgaaaatcaggatttgccgatttaggctgagtgattggggatgttgccaagagctagaacggcttagctttttctcgtctcacattatgccttccgattaataatgcaacggcattgcatagctgcaaggtccggcactgctatccgatactatcgaactgttgttttgcgttgcgcgagaagggacaaacatggcaaccgcttggggtgacgagagtgtgcggaaaaccggagttccctcgcctatgtacttgatgggcgcatgcgtatgtgatgatacggaaaccgaaacaaggcaaagattggcgttgcttaagcccaaaggagcaaggaaattgcactggcgagacatgcggccatcattgcgtggcaaagtcgttgatgccatggctgcaatggacattgatcatgtcattgtggctgcggtaccaatgagccagtggaataccgccgaacgcgctcgccgtaaatgtttggaacgtcttctgcctctgctggaaacagaatacaacgtggacacgcttgtgcttgaacggcgcgagatttcacaggacaggaacgatatccgtttcatcgatggattgagaagccgcagatttatcgggccaattcgtgtcgaactctgtgcaggggagactgatgcaaggctatggctccctgatcagctgctaggagcgtacggtgatgcccaggccggtactggaagatacgatgaattcctcggccatgttcgaacagtgttcatcgacagtgattgatgtcctaaaaccgtgtatacttcatggtaagccaaccccgctggggaaatggaagtgagagccggacgccccgagtatcttgggggccggctcttgcgtttcggtccactgatggtccggaattttgcatactatggttcggttttccggcctgacacgccatcgaacaagcgttcgaatttggtcgtgtgttcgggtatccttgggacagatttggcgcgcgcatgaccgtgcgcgcgggaacggtgagatggaaggtggggtgtggctgtggcggcaatgcagactggcgcaaggcgcgcaacaagcgcaacgggcgcgaaaaccggcaagggcaagaacggtgaggtcatcgtcgaaaaggtgatgaccagcgactccttcctgagccgggagatcaaaaaggcgccgctgattgaacacgatggttcgctggtagctgatatctcgcacatcccgaacgatctcaagatcacgattcagggtgcgcgcgaacacaacctcaagaacgtcgacctggcgattccgcgcaatcgcatggtcgtgttcacaggcctgtccggttcgggcaaatcctcgctcgcgtttgacaccctgttcgccgaaggccagcgacgctacgtcgaatccctatccgcctacgcccgccagttcctgggtcagatggacaagcccgacgttgacttcatcgagggcctgagcccggccgtctccatcgaccagaagaccaccaaccgcaacccgcgttctaccgtcggcaccatcaccgaaatctacgattacctgcgactgctcttcgcccgcaccggcatccctcactgccctgaatgcggcgagcccgtcgcctcccagaccccgcagcagatcgtcgacacactgctcggctacccggagcgcacgcgattccagattctcgcgcccgtggtcaagggccgcaagggcgagttcgtggatatgatcgagctgctgcgctccgacggctacgcccgcgcgctcatcgacggcgagatgacgcagctgtccgacgacatcaaactcaccaagcagaagaagcacaccatcgaggtcgtggtcgaccgactcgtggtcaaggacggtatccgccaacgcctgaccgactcggtggaaaccgccctcaagctcgccaacggcagcatcgtcatcgacttcgtggacgaggaggaaggcagcccggcccgccgccagccgttctccgaacaccgcagctgcccgaacgggcacacgctcgaactcgacgaggtcgagccgcgcaccttctccttcaacgccccctacggtgcctgccccgcctgcaccggtctcggcttcaaactggaaatcgacccggacctcatcatctccgacccggacaagtcactggccgacggcgtcatcgaaccgtggagcggcaccaagatgacctcccagtactacggccacatcctcgaaggtctggccaaggaaatgggcttctccatgaagaccccttggaagggcctgccggacgacgtcaagcacgacatcctctacggccacgacttcaaggtcaacgtctcctaccgcaatcgctggggacgcctgcgcgaatactccaccggcttcgaaggcgtgatccgcacgctcatgcgacgccacgacgaaaccgattcgcagtccatgcgcgaatactacgagtcgtacatgcgcgaagtgccctgccaggtctgccacggacgccgtctgaagcccgaagtgctcgctgtcactgtggacggaaaatccatcttcgacgtgtgcgacatgcccgtcgtacgcgaactcgcctggatcaacggcctgaaactcgaaggctcggcacagctgatcgccggcgaagtgctcaaggagatcaaggcccgactcggcttcctgaacgacgtcggcctcgactacctgaccctctcgcgcgcggccgccaccctgtccggcggagaagcgcagcgcatccgactcgccacgcagatcggctccggtctggtcggcgtcatgtacgtgctcgacgagccgtccatcggcctgcaccagcgtgacaacgaacgcctcatcgaaaccctgcaccacctgcgcgatctcggcaacacgctgattgtcgtcgaacacgacgaggacacgatacgccgcgccgactgggtggtcgacatcggccccggcgccggcgaacacggcggcgaagtcatctactccggccccgccaagcacctcatagaagccaagcgctccatcaccggcgactacatcgcccaccggcgagagatcgccgtgcccgccaagcgccgcaagatccacaagacccaggtgctcaaagtcgtgggtgcccgcgagaacaacctcaagaacatcgacgtgagcttcccgctcggcgtgctcaccgtggtcaccggcgtctccggctccggcaaatcctcgctggtcaacacgatcctctacccggtgctcgccgacaagctcaacggtgcacgcatcgtacccggccgccacacgcgcgtggaaggcgtggaccaggtgcgcaaggtgatccacgtcgaccagaacccgatcggccgcacgccgcgatccaaccccgccacctacaccggtgtgtgggacaagatccgcacccttttcgccaagactcccgaagcccaggtgcgcggctacggccccggccgcttcagtttcaacgtcaaaggcggccgatgcgaggcctgccacggcgacggcacgctgaagatcgaaatgaacttcctgcccgacgtctacgtggactgcgaggtctgccacggcaaacgatacaaccgcgagacccttgaagtcacgtacaacggcaagaccgtggccgacatcctcaacatgcccatcgaggaggccgccgacttcttcaaggcgtacaccggcatctcccgatacctgaagaccctcgtggacgtcggcctcggctacatccgactcggccagcccgcacccaccctgtccggcggcgaatcgcagcgcgtcaagcttgccaccgagctgcagcgccgatccgacggcaaaaccgtgtacatcctcgacgagccgaccaccggcctgcacttcgaagacgtgaacaagctgctcaaggtgctgcagtccctggtggacaagggcaatacggtcatcgtcatcgaacataatctggatgtgatcaaggaggccgactggctgatcgatctcggtccggagggtggcgacggaggcggcaccatcgtcacgcagggcacgcccgaacaggttgccgaatgcgaagcctcctggaccggcaagttcctgaaacccatgctttagccttccattgcagctgacctcgggtgggttggggtgtgtgttgctggaccgtaaagacttggcctgagcggcccggagcgtgtccagcaacacacaccccaacccacccaatccctgatgattggcttaatagcgaggaggattatgacgaacgatattgagcggcatagtccggatgagtggcggaagactgcggcggcgttaatgtcggaaagcgtagctgtgggtgccggggaaacgacggcgaaggtgaatgcgaatggggcacctttgctgggggattctcgcgacctgttccgacccaagacctcggatattcccgccaaacccggtgtgtacaaatggcgcgacggggaagggcgcgtcatttatgtgggcaaggcaaagaacctgcgcaacaggctcaccaattatttccagccgctgtatctgctgcatccgcgcacgcagaccatggtgctgaccgcacgcagtctggagtggacggtcgtcgccaccgaactggaatcactgacgttggaatacacgtggatcaaggaattcgacccacggttcaacgtgcagttccgcgacgacaagacctatccgtatctcgcggtcagcacgggggagcgaattccgcgcgtgtgggtcacgcggtcgcgcaaacggcgggatacccggtatttcggcccctatgccaaagtgtgggaattgcggcacagtcttgaccggttgctgcgcacgttcccggtacgcacctgcaccaccaacgtgttccataaggcgcaactgaccggacggccatgcctgttcgcttccatcggcaaatgctccgcaccctgcgtgaaccgcattgaagcggacgaacaccggcggctgtgcgaacagctggtcggcgtgatgaccggacgactcggacggccatacatcgcccagttgacccgcgacatgaaagaggccagcgccgaactcgaattcgagaaagccgcccgactgcgcgaccagatccaaatgctggaaaccgtggtgcaacagaacgccgtcgtcttcgaccaggatgtggacgctgacgtgttcggcttcgccagcgacgagctcgaagcctccgtgcacgctttttatgtgcgcgccggctcgattcgcggcgaacgcaactggagcgtcgaacgagttgaggacatcgatgacgccgacttgatggccgaccttctggtgcaggtgtattcggacgccgccggggataatcacccccagtcggccgcgaccatctccaccaatcgcgaggccatcggctccacgcaaaccatcacggccacggacgctgtggcacgcgcccaggccacccgagaacgcaacacccgtcaggagaccaccgggcgcgcggacctgctggcacccatcgcaccggtaccgcgcgaaatcatcgtgcccgtcgaaccggcccgccgtgaggaactcgaaggctggctgaccaatctgcgcgggggagcggtgaccatccgtgtggcctcgcgaggcgacaagaagcagcttatggaccgcgccaacgagaacgccagccaagcactgcaacgcagcaagatgagccgcatctccgacatgggcgcacgcacccaggccatgaacgatgtggccaaggcattgggactcgcggaagccccgctgcgcatcgaatgctacgacatttcgaacactgtgggtggtgccttccaggtggcctccatggtggtgttcgaagacgcgatcgccaagaaatccgaataccgacgcttcgccatccgaggcaaggacggcaaaggcgcggtggatgatctgtccgcgctttacgagacgctcacccgccgcttcaagcacggcaacatcgccggcgactccggcgaaagcatcgacgcggaacagcgtgtggcctcggccgccggcaagatgaccactgccgtggcggcggagacaatcgctgcgaacggtaacgacaatggtgagggcggttccgacatcagtggcaaggggcacgcggtgccggtcggagtgcagaacgatgcgcgggagtccccgcccgacatcgtccagcagaacacaaaccggcatcactttgcctacaagccgaacctggtggtggtcgatggcggcaagccgcaggtcatggccgccgccaaggcgcttgaggactgtggcgtgaacgacgtggccgtctgcggactggccaaacgcttggaagaggtgtgggtgccggacgacgactatccgatcatcctcaaacgccagtccgaaggcatgtatctgctgcagcgtgtgcgcgacgaatcccaccgcttcgccatcacctaccaccgccagcagcggcgcaaaggcgccctgcgcagcgcgctcgacgagattcccggcatcggcgaaagctaccagaagcggctgctcaaccacttcggctcggtcaaagccatgcgcgaagccagtgtcgaggacttcgagaaggtcaaaggcatcggccacgccaaagccgaagcgctgtacaccgcgctgcacgagcagtgagccggcccggtccagcagcccagagtaaattttcggttgcggggcctgtggttgacatattcgaagcaaagtgtcggctagcatgggaacagacatcaaggaggggatatggccaatcatcgttgcgctgtactcggcaaacccgtcgcacactcattgtcacccgtgctccacaacgcggcctaccgttcgctgaaactcgacgattggctgtacgacaagcacgaggtgggggaagacgacctcgacgctttcctcaaaggccttgactcgacgtgggctggcctgagcctgaccatgccgttgaagaagaccatccaaccgtacggtgttccggaaaatttgtgggccaaggaactgaaggtggcgaataccgcggtattcgactggagcgtggctgccgatgattccgcttggccgaacggcaagccgggcatcaagctatacaacaccgatgtcatcggcatccaactcgccttcgaccatgccaatcgcgaactcggcgaacaccacaccgcgtcgagaagcggcaccgcgctgatcatcggcaatggcaacaccgccacttcggcgttggccgcatgctgcatgatgcccgaaatcggccatatcgtcgtcgccgcccgtcaccccggaaaaaacaccgggcttaaaccagtggccgaaaagttcgtcaacgtgcataacccgtacaacgaaatcgaattaggcgacgatcaggccctgcttgaggcagcccgcaacgccacctatgtcatcaacacgattcccggacacgcggccgacaacgtcgcggatgccctcgccaatgccggaaccgagccattctccggactgctgttggacgtgatctacgatccacgccccaccaagctcatggaagcctggcgcgctcatggcggtcacgccatcggcggcgaagaaatgctgctgtaccaagctctcgtacaggtattgctgatgaccggtatctgggatgacgacccgcccagcgatgccgaccagcgtctgcaggacaccaccaccgaagacgaccagctggagatcgcgatgcgcaaagctcttgaggaggcgctgtaatgaatcaacagacaacgaaccgcgataccggcgaggcggccgccacgaatgcgccggcgaattccgcgacatccacatcgactccggacaaccagccgaccccgcttgatgccttcgaagtgctgctcatcaccggtatgtccggcgcaggccgctctcatgccgctgactgcgtggaagacatgggatggtatgtggtcgacaacctgcctcccaaactgcttatcccgcttgtcgacatgatgaccacctccggttccggatcggagtcaggcgtccacaagcttgccgccgtcatcgacgtgcgctccagctatttcgacgagctggccgccgtgctcggccatctggatgatctcggcgtcaaaacccgtattctgttcctcgacgccagcaacgaagtgctcatcaagcgctatgaatccgtgcgccgcccgcacccgctgcagcacggcaaccgactgatcgacggcatccttgaggaacgtcacctgctggaagacctcaaggaacgagccgactgggtcatcgacaccagctccctgagcatccaccagctgtccaccaaactctacgaggcgatgctcggctccggccccaccaccgtggcagtacacatcttcagcttcggcttcaaatacggtatgcccatcgacgccgatttcgtggccgacgtgcgttttctgcccaacccgttctgggtgcccaacctgcgcgagcttaccgggcacgacaagccggtcgccgactacgtgctttccagcaagggagccaaggaatttctcgacgcttatgagaaagctatcgagattgcgttggaaggatacgcccaggaagacaagcactacgtaaccatcgccgtcggctgcaccggtggtcagcaccggtcggtggcgatgagcgaagagctggctcgccgcttacgcgcacatgggctcaacgtaaccgtttccgcgagagaacagcacaagcgtcactcatcgtaagcaggcgtcgagcggtcatcgggcaagtgttcggtgaccacactgcgagaaagcagggcccataatacgtatcaaacgggttcgcttgtccaccagattaggtatcacagaaagccgatggcttccgaccgtgtgacagcagataacggcacgaagcgcctgaagcattgagaagaacgggactgtaggaggtagatcttggctcttctggacgatgtcaaaagcgagttggcagcctttgaaggcgattcgccagccgcgatcaaggcccaagctgcggccatgatccgttttggcggcggtcttcgaccggtacagaatacatacgttatccaagccgtattcacctcgcttgacgttgcagaatggctgaagaacacgttgaggaacacgttcgggcacgaagccgaggtcaatcacctcacacgtcagaccccgaacggccctgtcgagacctacgtggtgctcgtcacccgcaacgtagtggccttggctttgcagaccggactggtcgaccgccgcaagcagcaggtccgtggactgccgtctgaagtggtcaacggatccatcgcccaaatcaaagcggcatggcgcggcgccttcatggcccgtggcttcctgtccgatcccggtaaggccagcttcctggaaatcgcttgccccacggaagaggccgccatggccctgtgtggcgtggcccgtcgtctaggcatccaggccaagcatcgcacgctgcgtagctccgagcgcgtgacactcaaggatcccgacgccatcgaacgcatgctcaagctcatgggcgccacccgttcggctcgcgaatggaccggcaagcgttccgatggcgaggcccgcggcaaggccaaccgtctggccaacttcgatgacgccaatatgcgccgttccgccaaggccgccgccgaagccagcgaaaaagtgcagcatgctttcgaagtactcggcgataacattccggacaacctccgtcaggccggccagctgcgcatcgatcacgtggacaagagcctcgaggagctcggcaagatcgccgaaccgcaaatcaccaaggatgcgattgccggccgaattcgccgactgcttcaacttgccgagaagacggagaaggctcgcgcagccgaaggcaagtaacccgacaatccgatttgccgtgcctattcggcaaaacgcgacaacgatgtgacaaaacaccgcattcagtcagtagacgaatgcggtgttttgttccggaatgcctgtaatatgcaaagtggcaaaattggccactttgacgtgcgattcgtcaaggaaaggatattcatgaagacactcaaggaccttggagatctcaagggcaagcgcgttctggttcgcgctgatttcaatgttccgctggacggcaccaccatcaccgatgacggtcgaatcaaggctgctctgccgaccatcaagaccctgcgcgaagaaggcgccaaggtcatcctcatggctcaccttggccgcccgaagggcaaggtcgttcctgagctgagcctggccccggttgccgcccgcctcggcgagctgctcggcgccaacgtgccgctggccaaggacacctacggcgaggacgctcaggccaaggtcgccgccatgaacgatggcgacgttgtgctgcttgagaacgttcgtttcaacccggaggagacctctaaggacgccgacgaacgcgccgcttacgccaagaagatcgccgccctcggcgaggccttcgtttccgatggcttcggcgtggtccaccgcgctcagggctccaactacgacgttgccgccgatctgccggccgccgcaggcctgctggtcgagaaggaagtcaaggccttgtccaaggccaccgagaacccggagcgtccgttcaccgtggtgctcggcggttccaaggtctccgacaagctcggcgtcatcgagaacctgctcgacaaggccaaccgtctggtcatcggcggtggcatggtgttcaccttcctcaaggccaagggctacgaggtcggcacctccctgcttgaagaggaccagcttgagaaggtcaagggctacatcgagaccgccgagaagaacggcgttgagctcgtgctgccgaccgacgtcgtcgtgaacgccggcttcccggccggtgacaccccggttgctccggaagtcgttgccgccgacgccatcccggccgacaagatgggtctggacatcggcccggagtcccagaagctcttccacgacaagatcgtcgactccaagaccgtcgtgtggaacggcccgatgggcgtgttcgaggttcctgagttcgccgccggcaccaaggccgtggcccagggtctggtcgacgccaccgcagccggtgcgttcaccatcgtcggtggcggcgactccgcctccgccgtgcgcaacctcggcttcccggaggacggcttctcccacatctccaccggtggtggcgcttccctcgagttcctcgaaggcaaggagctccctggcctgaaggtgcttgagtaatccattttctagctcccctacttgaggggagctacgtttttttagaagggaaacatatggcgtccaaacgcattccgttggtggccggcaactggaagatgaatttcgaccatcttgaagccacttacttcgtgcagaagctggtatggctgttgcgtgacgctcacttcgactttaaacgctgcgaagtcgcgcttttcccctcgttcacgtcattgcgcagcgtgcaggtgctggtcgaagccgacaagctccatgtcgcctacggcgcacaatccgtttccgtgaccacccaaggtgccttcaccggcgatgtgtccgcggacatgatcgcccatctcggctgctcatacgtcatcgtcggccactccgaacgccgcaaataccatcctgaagatgacgccaatatcgtcgatcaggtacgtgctgtgctcgccgccggcatgcagccgattttgtgcgtcggcgaaagcttcgaggaacgacgtcaaggcattgaactcgatttcgccgtgggccaggtacgagacgtcacccgcgatctcaacgaagaacaagccgccaaactcatcgtggcctacgaacctgtctgggccattggcaccggcatggtggccactccgcaatccgcccaggatgccgcaaacgccatccgcaacgatttgaagaccacttttggcacgaaggtatccgatagcgtacgtatcctgtacggcggatcggtcacctcgaaaaatgcggcggaactcatttcccagcccgacgttgacggcttcctgatcggaggggcggccctggacgttgaggaactcgccaaaatcgctcgactggcactgaaatccacgaaatcacggaactaataccacggttttcccgtgtgtgcgctatgctggtcaacagtccaatcaatccggaggtaccctgtgaccgctcttaagatcacgctgcaagtcatcgtcgtgctgctcagcttcgtgctgaccctgctcatccttatgcacaagggcaagggcggcggtttgtccgacatgttcggcggcggtctgacccagaacgccggtacttccggtgtcgccgaaaagaacctgaaccgttggaccgttatcatcgctctggtgtgggtagccttgatcatcggcctcgacatgatgaccaagttcaacctcggctgatcggcttgcacgccatatagacttgtcgctcgcgacccatgaccgttaccgtcggtcatgggtcgtatgcgttctatcgagtattacgaaaggacatcaccatggtcactatgaaccgcaacaaagtcgttatcgtcggcaccggccgggtcggtgccaccgccgccttcggcatcgtcacgcacggcctgtgcaatgagcttgtgctcatcgactgttccgccgccaaggccctgggggaggcccgcgacctcgatgatggcagcgaattccaggaccgccacgtcaaggtgcgcgccggcgactacgccgactgcaaggatgcggacatcgtcgtcatcaccgtgggccgcaagccgccggccaactccaaccgcatggccgaactcggcttcaccgtgggtcttgtgggcgaagtggtcgacaacgtcatggcctccggttttgacggcgtgatcgtcatggtctccaacccggtcgacgtgatggcttggtatgcctggaaacgttccggtctgcctcgcacccaggtgctcggtaccggcaccgcgctcgacacctcgcgtctcaagaccatcatcggcgaagagaccggccttgacccgcgcaacgtgggcggcttcgtgatgggcgagcacggcgactcccagttcaccgcatggtccaccgtctcgctcggcggcaagccattcgcccgcttcctggccgacaaccaagaccgtttcgcctccgtgtccaccaccgaaatcgaagagaagacccgcacccgtggcaatgagatcgtcgcggccaagggcggcaccaacttcggcatcgcctccaccgtggccggcatcgtacagaccatcctgtgggacgaacgccgcatcgtgcccgtctccaccctgctggacggcgaatacggcgaacatgacgtgttcctcggcgtccccactgaactgcgcgccaatggtgccaacgagatcgtcgaactcgatctgagcgaggacgagcgggccaaactgcaccattccgccgaacttgtgcgtgaacactgtgaggggctgctgtgattctcgacgccatcacgccgaaacaaccccgactgctggtcgccgacctcgacggcacgttgctgcacgacgccgaggtattcgaggaccggttcattacccagcgcagcatcgacaccatcaaccgcgcgcacgatgccggaatgcaattcgccatcgccaccgcgcggccggtgagtaccggtctccagttcgccgaaaaactgccggtggacgccgtaatctatctgaacggcgccctcatcgatttcgacccggcccactccgacttcgacctgctcacctcaggtgccacgccggccgatgagaaccatttgatcaagattggcttctcctcacggcgtgcctgcgaagtctgtctgttcctgctcgatcgcatgcccggcctgaagctcggcatcgtgatgaacgacgtgcgctacaccaacttcgatgtgcgcgtgtattggaaaactcaggccttccaatacacgaacttccacgacgtgcccgaaggcgtggcggacaaaatcaccatcttccccgaacctgaacagtggaacgagctgcgtgcgctgattccgccggacttcgacatctccatcagcgaaggcgtgatgtggatgctcatgaacccgcaggccaacaaggagcacgcgctgcacctgctgtgcgagcgactggacgtgccgcttgaacagacagccgccttcggcgacgacctcatcgatatcaacatgatgagcgaatccggccggggcgtggccgtggccaacgcgaaccccaaggtgttgtccgtcgccgacgagatctgcccgtccaacaacgaggacggcgtcgcccaatggattgaagcgcagttgggttgaaccggtcgagactcgagaacacgccaaaattgaacttgtgttgaaccgggggtatgctttgaaccgttgttcaaaagataaattgaactcccggttggaggcataaggatatgagcgtatcggtgtttgcggaacgtctgcgcaatgcgatgaacagcaggggattgaagcaggtcgatttggtgcacgccgccgaacatcgtggcgtaaagatgggcaagagccacatcagccaatatgtggccggcaagaccatgccccgcgaggacgtgctcgaattcctggccagcgaactggacgtcgacacgaattggctgcgcggcgaggaatccaccacgcaattgaactcggacgcatccaacagcgtcacggacggcgaacacgccgccacaccgcttgccatgggtgccgccaagccccagacggacagcgagattcccgtgggccgccgccgcaccttcggcaaatcgcacaagctcgacaacgtgctctacgacgtgcgcggcccggtcgccgacgaggcgatgcgcatggaggccaacggcacccacatcctgaaattgaacatcggcaacccggcacccttcggcttccgcacgccggacgaagtcgtctacgacatggcccaccagctcaccgacaccgaaggctactcgccgtccaagggcctgttctccgcgcgcaaggccatcatgcagtacgcgcagctgaagaacatcccgaacgtcaccatcgacgacatctacaccggcaacggcgtcagcgagctcatcaacctgtccatgtccgcgctgctcgacaccggcgacgaagtgctcgtgccctccccggactacccgctgtggaccgcctgcgtgaacctggccggcggcaccgccgtgcactacctgtgcgacgaacagtccgaatggtatccggacatcgacgacatccgctccaagatcaccagcaacaccaaggcgattgtcatcatcaacccgaacaaccccaccggcgcactttacccaaaggaagtgctccagcagatcgtcgacatcgcgcgcgaacaccagctcatcatcttctccgacgaaatctacgatcgcctcgtcatggacggcctgcagcacatctccatcgcctcgatggccccggacctgttctgcgtgaccttctccggcctgtcgaaatcgcacatgatcgccggctaccgcatcggctggatgatcctgtccggcaacaagcgcattgccaaggactacatcgagggcctcaacatgctcgccaacatgcgcatgtgttcgaacgtgcccgcccagtccgtggtgcagaccgcgcttggcggccaccagagcgtcaacgactacatcgtgccgggcggccgcgtgcacgaccagcgcgacctcgtctacgacatgctcaaccagattcccggcatcaccgccgtcaagccgaaggccgcgttctacatcttcccgaagatcgacgtcaaacgcttcaacatccactcggacgagcagttcgcgctcgacctgctgcatgacaagcacatcctcatcagccacggcggcgcgttcaactggcatcgccccgaccacttccgcgtggtgtacctgccgcgcatgggcatgctgcgcgaaaccatgggggagatctccgacttcttcagctactactggcagagctgatccttggcgcaaacgaacacgctcgattgtttcgtgatatgaaggagatcttatgccggtggtgtcgcgtcgtgcgcaggaagcgctgtatcccagcgatcgcgcgaaccgcggcatagtggtccgcgctatgccaaggtgaaggcgatgacgaaggccgtggcggacagtgcggttgccaggagcagatagcacacggcggctgaatttcgagagccatcggcattggcagcgttaccgccgttatttgcgttgcgtgcagccaacgtgatggccgtaatcgccgaaagcagggagaacaatggcagcacgcacaacacgacggtcagcagtcccaaagcttcatggccgatgcaataagcgacaagacctgcattgtcagttgccgatagcgctgggcagaaatcggtgtgtctaccagtgttgtagctgtaggtaaagaacgtgatacctgaccagaacagggcaacgggaacagagcaattgcgtatggcggatgcgttgatgctgatggtgtggaacaggtcgtgcaaggaggtagcccgtataccactgcgttctggcgtgattcgattactgttgttttgcgagtcgatggtaagagaggcgcattgcaccagcgcatatgccgcaagtccaagtccgcaagcgatggttgcgccgccgctgaagttgacctcgtcggatactgaatattcggtgacgaataccggcatcacgccaatctgccatacgaacaacagtcgcgcgattcgtatccaaccgttgctcagatatgaggtgactatggcgtgcaccagccacgtcaccgcatacatcgcccacaacgttacaatcttggtattcgcactcaacaccaatatgatcgcaacagccactgccgcaataagaacactaaacaccgaacagagccgatggcgcgaaaagccctgtactcccgcaacagtcagacagagaatcgcgacaacactcagcgcagtcaccgtcataaaccacagtggtgaggtgacgcaggctccataatcgtcagttgcttggcccgagagatagtaggtcattctgccaatcgccggacaattcggatgcaacatcatgccgccccaaatgcgctcatataatggcgcgaacgatacaccggcaccactgagcgtcgcaacaaccgccatcaccatggccggaatcagcccaagctcgcgattccggccggtttccgctatctgtctatcactggtgtccatgactcaccccaccttatgccgttatcgccgtcgtcgatgatgctagtataactatggcagatgggcggagaccagcggcatacaggaattctgtatgccgctttataggagggatactgcggcagccgccatcaccgaccgaccgccagactccggcacagaccgggaagaactaccgtcgcggagcatcggcgataccaatggcaacaccgaggatagccgggaccacccagccgagctggtattgctgcaaaggcagcatagccagcgccgcgtccagccagccgatggaaccgccgaagacggcgaccaaactggagatgcaggtggcgaaggatgcgatgcccaccagcagcacggtccagaagtagacgcgcgggaatcgcgcgccgagcgacttgtgggtcagcgtcagcagtaccagcacgatggcgatcggatacagtgcggacaacaccggcacggaaaccttgatgatcgcgcttagcccggcattggacacgatgaaactgaacacggtgaagatgacctgccaggtgcggtagctcaacgttcggccggcgacggtccggaaccgagtatggaagtaggtggcgcaggtgccgatcagtccggtgcatacgttgaggcaggcgatgacgaacacgatgccaaggaacgcggtaccgaacgtgccgaacagggatgaggtgaggttggtgagcacggtcgcgcccgtgtctttggtggggtcgatggtggcgatggcgccggacaccacgcccacgtagcttagcgcgccgtaaatcacgatcagcagtacgccggtgccgagcccggcatacgcggtctccttctgcacttgcgattcgtcatcgacttgttgggcgcggatattcgcagagatcacgatgccgaagtagagcgcggcgagcaggtccatggtctggtagccgtcgaggaagccgcgtgcgatctggtttgtggagtagtcgcccatcgggttggccggggtgccgatgccgtggatcaggcaggcgatgaacaggacagcaatgagcaccagcagcaacggtcccatgaatcggccgagcactttggagagtttctcgggatgctgggcaaacaggaacgccagcgtgaagaacacgagcgagtagatgagttgggccagccagccataggaggacggtacgaaaggagccaccatcatttcgaatgaggtggtcgccgtacgcggaatcgcaaagcacgggccgatggtgagcatgatcgccacgccgaggaacaaggcgaatttgggggagacccggctggcgagtttgtcgaaaccgccggcgaaggtgaccgccagcacgccgagaatcggcaggccgactgcggagacgatgaaaccgatggccgccggtatggtcgcggaaccggcctgcgcgccgacgaacggcggaaaaatcagattgcccgctccgaagaacatcgaaaagaaggtgaaggtcatcaccaaccgctggcgtgcgacaagtttgttcattacgattcggcctttctctcatatgctcgtaccactgtagcaacaaacgaaagaagccccgaccgttggggtcggggcttctgtgagctaatcaactagtgcgctaaacacgcatcagtcgtcaaatctcaggcgttcacgcggtcgatgccggactggacgtcagacagcacggaatcccaggacttgatgaaggcagcgacaccgtcggcctccagcttgtcggtgacgtccttgaggttgatgccgagctcagccagcttgttgatgatggcgtgggactcttcgtaggtgccctcgatggacggagcgccgttgccgtggtcggccagagcgttcagggtcttctccggcatggtgttgacgatgtgcttggcaacgagctcgtcaacgtacttgcagtcggagtaggcggcgttcttggtgccggtggaagcccacagcggacgctgaaccttggcgcccttggcagccaggtcggcccaacgcggatcctcggcgaacttcttctcgaagagttcgtaagccaggcgagcgttggccacagcggccttgccctccagagccttggcctcgtcggagccgttggcttccagcagcttgtcgacagcggtgtccacgcgggacacgaagaaggaagcgacggagccgatgtgcttcaggtcgtggccgttggcggcagcctgagcgatgccctcgatgtaagcgtcgatgacctgctcgtagcgctcgagcgagaagatcagggtgacgttcacggagatacccttggccagggtggcggtgatggccggcaggccttcgagggttgccggaatcttgatcatggcgttcgggcggttgaccttctcccagagttccacagcctgcttggcggtgttctcggtgtcgtgggccagacgcgggtcgacctcgatggagacgcggccgtcgacgaagtcggtagcctcagcgatctcgcggaagatgtcggtggcgttgcgcacgtcggtggtggtgagctcgcggacagcggtctcaacgtcaaccttgccgagctccttgagctgagcgtcgtacgggccgacctggctcagggccttctggaagatggacgggttggtggtcacaccgacgacgttcttgttggcgatgaggtcctgcagggagccggactcgatgcgggagcgggacaggtcgtccagccagatggaaacgccgttgtcagacgtacgctgagttgcttcagtcatttatttttctccttatattccgtattggaacaaatctttaagtagaccccctctaacgagagggccgatcaggtggagtcttgagtacaagcctccctcgtcagagggaggctaggggactcacttggcggcttcgacttcggcgatggaggccttggcggcttccaccacgtgctcggcggtgatgccgaggtcgatcatgttctgagcgccgtcgccctgcaggccgaactgctcgatggagacgggcttgccgtaggagccgaggtacttgtaccacggcatggcaacgccggcctcgacggagacgcgggccttgacggcggccggcagcacggcctccttgtactcggcgtcctgctcctcgaaccattccatggacggcacggacacgacgcgagccttgacgccctcgccggccagggtcttggcggcagccacagcccactggacctcggaaccggaagccatgaggatgacgtccggagtgccctcggtgtcgaccagaacgtaagcgcccttcttgacaccgtccttggccttggcggcggtctcggcaagaaccgggacaccctgacgggtcagaaccatggcaccaggcagggtgttcttcttctcgaagaagtaacggtaagcctcggcggtctcgaaggcgtcggccgggcgaatgacctcaagctgaggaatcgcgcggaaggaagcaaggtgctcaaccggctggtgggtcgggccatcctcgccgacggcgacggagtcgtgggaccagatgtacaggttcggaatctccatgagggcggccagacgaacggcggaacgctcgtagtcggagaacatgaagaaggtgccgccgaacggacgggtgtgggagcccagcaggatgccgttggtgatgcagcccatggtgaactcgcgcacgccgaagtgcagctggcgaccgaactcgttgcagttcggccactgcttggtggcgcactcggccggggcgaaggtggcagcgcccttgagatcggtcttgttggagccaccgaggtcggcggagccgccccagagttccggcatgacagcggcgatggcgttgagcacggagccggaggcgccacgagtggcgacacccttgccgacttcgaaggtggcctcaaggtcgtcaagagccttgtcgaagccttccggcagttcaccggccttcagacggtcgtacagggcagccttgtccgggttggccttgcgccaagcgtcgaacttctcgtcccattccttgtgggcttcgagaccgcgctcggcaaccttgcgagcgtgagccagagcctcttcgtcaacgtggaagttctcttccggatcgtagccgagggcttccttgaggccggcaacagcctcggtacccagcttggaaccgtgggaggacgggtcgttggtcttgcccggggtcggccaagcgatcagggagtgaaccttgatgagcttcggctggtccggagcggccttctcggccttggcgatgacgtcagccaagccctcgatgtcctccttgtaggagccgtcgggctggatgaagctgaactcgtcggtgtaccagccgtaggcctggaagcgcttgagcacgtcctcggccagcaccaggttggtgtcgccttcgatctggatgcggttggcgtcgaagatcacggtcaggttgccgagcttctggttggcggccagggaagcggcctcgccggagatgccctcctcgatgtcgccttcaccgcagatggcccagatcttgtggtagaacggggaatcttccttcggggtctccgggtcaagcagaccgcgctggaaacgctcgccgtaggcaaagccgatggcggaggcgaagccctggcccagagggccggtggtcatttcgatgcccggggtcaggccgtactccgggtggcccggggtgcgggtggcagcgccgccacggaagttcttaaggtcgtccagggtcacgccgtagccggagaagtacagctggacgtactgggtgagggaggcgtggccaccggaaaggatgaagcgatctcggccttcccagttgggatcattcggatcgtgcttgatgaagtgctggtacagcgtgtaggcgacgggcgccagggagatgggggagccggggtggccggagcctgccttctcaaccgcgtcagccgaaaggaccttcgccatcttgatggcgcgctcgtcgagctcggtctccttgaattcggtcatggattactttccttccaattggtcgggccgcgtatccggcttgtgccgggcgcttgacgccctcacattgcgattaccatgctagcgtcggtttgcgacgttgtggtgcaattttggcgtgttttggtagtttgtgttctgttagcgttcacagtgaacattgctacgctgcaaacgaacgcattagcactcaagcctaaggagtgctaatacaatgttctaaggtgaagtgcgccacctgcacgtggcggagccaagaaagaggcaatatttctgggttcccgcgtgtcgcggcgtggcgaaccgaccgtcggggtacgccctgagtgaaccgtgactgatatgaatatgtatgcatatatgaggaggcgcgcatgacgcaatcaagacgcatgctggtgctgcgcgccgtggtggaggattacatccgttctcaggagcctgtgggctccacttcgctgacgcgcgaccatgatctcggcgtcagttcggccaccatccgtaacgatatggccgctctggaggacgaaggctatctgattcagccgcacacttcggccggtcgcgtgcccaccgaaaagggctatcgatactttgtggaccgacttgctaccgtggtgccgctcagcgaggcgcaacgccgcggcatcaacagcttcctgtccggatcggtgagtctcaaggacgcgctgcaacgttcggcacgactgctgtccgaaatcaccggtcaagtggccgtagtcgcctcgccatcgctggccaaggccacattgcggcacgtggagatggtgcccgttgccatgaccacgttgctcgccgtggtgattaccgacacaggccgcgtggcccagcacggcctgaccatcgcatccatgcccgccgtggacgagatcaaccggctctccaacaccgtcaacgagcaatgcgacgggctgtccctatcgaaatccgcggagaccgtgcgatccatcgccgccagcgccggctacgagtcggtgcgtggcgtggccgacgcgctggccgacgccttcgaatcgatggcattggacgaacgcgcgaacgaactgtacatgtccggcacctcgcacctggcccactcccggtccctggccgatctggccccgctcttcgacgcgctggaagaacaggtcgtgctgatgaagctcatgagcaacctgagcgaggagacgaatgcatccggcgtgggcgtggccatcggctccgaaatgcacacccccggactactgcatgcttccgtggtcagcagtggctatgggcgcagcggagcggcgggcgaaccggcggggaacgatcccgtaggcgaacccgaaaccgaatccgagacggagagccagacgaacgacacggaacccatcgccttcgttggctccatagggccgacccacatggactacgcggccactatggccgccgtcagggccgtagccagatatttgaccgccttcctctccgagggccggactcaagactgaccgccgtctgtggcacaatgacccgcagaccaaacgaacacaaaggatcaatcaagtggcagattattacgagacgctgggtgtggaacgcggcgccagtgacgacgagatcaagaaggcataccgcaagctcagccgtaagtaccaccccgacatcgcgggccctgagttcgaggacaagttcaaggaagtgaacaacgcctacgatgtgctgtccaatccggacaaacgccgtatgtatgattcgggagtcgacccgaacaacccgaacgccggtgccggcggcttctccggggcgggcttcggcgatatgagcgacgtgttctccacgttcttcggttccgcgttcggcggtggctcacagggcccggtgccgcgtacccagcccggccgcgatgccttggcctcggcgtccatcgatttgaagacggcggtgttcggcggcaccgcgcatgtcaagatcaatacgttctccctgtgccaggagtgcggtggctccggtgcccagggcggcgcacagccggtcacctgccccgactgccacggacagggattcatgcagaaggtcgtgcgcaccatgctcggccagatgatgacctccgccccctgtgaacgttgcgagggccacggtaccatcatccagaacccgtgccccagctgcatgggccacggccgtgtgcgcaccacgcgtaccgtgggcgttaccgtgcccgccggcatcaacgacaacgcgcgtctgcggttggccaaccagggcgaagtgggtgagggcggcggcgctgccggcgacctgtacatcgacatccgcatcaaggcggataagcagttcacccgcgatggcgacgacctgcactgctggattcaggtgccgatgagctgggccgtgcttggccacgatctgtccattgatacgttcgatggtgagaagaccgtgtccatcccggccggctgccagactgaggacacggtgacgcttaagggactgggcgtcacgaacatccgcaacaaggacgagcgcggcaacctcatcgcccacgtcaatgtgcttatccccaccaagctcaacgaaaccgagcgtggcctcatcgaacagttcgccgcctcgcacgattcaggcgccacgcacgtctcccaggcatcccgtccacaggccggtcaaaagaaaggtttcttcagcaagttgaaggacgcactgagctgagagcggatgcgttcttggctccccctctgaggggagccaagtctgttacttcagcagggagcggcacatggagcggtattcgttgacgtagccgccgccgaagaagacgcagtggccggcgatggggtagagctgccagagcgtgatgcgctcctgccatccggccttcaatggatgtacggactggtagccctcggtgatttcgctcagatagctcatgccgaacaggtgcagcatagccagatcctcctcgcgatgaccgccatgtgccgccgggtcgatgagcacagcctcgggctgcccggaatcggcggtccacatcacattgccgctccacagatcaccgtggatgcgcgccggcttgtcggacgcggctcggcccatcagatccggcaacgcttcaatcacgcgctcggtcagttcgacatcgcgcttatccagctcgccacgcctcacaccaaggttgaccatcgggcgcagacgtccatcagcgaaatagctgatcgggtcggtccactcgccggtatccattttcactgggtcctgcaatggtccgaaatagcatgtgccgttatatccgtcaggcgcagacccgaaatattcggcacccacatcatgcatatgggccagagccgcaccaaaagctcgtgccgcctgaggcgtgggggacgcgctgcccacacgttcgatatccagataatccttgccccagccgtatacctgcaccacgcgcgggccgccctgcgcatgagccgctcccaaccattcgagtcctcgaccctcgcattcgaagaatccttccggtgcgaatgccctgcttttgcgatacgtggccataatgctcccttcgtcgcttacgtactatatccactttcattgtagaagccgtggatgttaccgattcttagtgttgttctacacccccttgggtagggtgttcatcgtcataacacatcaaatacttagaaatcacgaggggttatgaattttttccaagcgatcattctcggcatcgttcaggcgctgaccgagtatctcccggtatcctccagcgcgcatatccgtattttcggcgatttgatgctgggctctgatcccggtgcggcgtttaccgccatcatccaaatcggcaccgaacttgcggtgattctgtatttccgtcacgacatcatcaatatccttactcactggttcagctgcctgttcggcaagaacggcaaggattggaaggcccgcatgggccgcggcgacaattacgccacactcggctggaacattatcgtcggctcgattccgattatcatcctcggcttcactctgcagaacgtcatcgagacctcgttgcgcaacctgtggattacggtaaccgtgctgttggtattcggcattctgctgtggatggtggatgccaaggctcgccagaacaaagccatgaatgatatgacgtatcgtgatgcgttcctcttcggtttgggccagtccatggcgctgattcctggtgtgtcccgctccggcggcaccatcaccgtcggtcgcgcactgggctacacgcgtgaggccgctgtacgtctgagcttcctgatggccatccccgcggtgttcggctcaggtttgctcgaagccatcaaggccgtgaagaactacaaaaccgatgcgatgttccccggctgggggccgaccctcgtagccatggtcatcagcttcgtactcggctacatcgtgatcatcggattcctgaagttcgtatcgaacttctcctataaggccttcgccatctaccgcatcggtttggctgtggtcgtcgccttgctgctgattgtgggcgtgctgccggccatcgatccctccgtggcggctgcggcataagacgggtcgatagacgactccaatataatggtgctcccgctggcgggaaccgtcagcgaagctgactgggggtggtcactggaatatgccagcagaaccaccctcagtctcgctacgcgagccagctcccgacattttgtgcgacgtgcacatggtgcactgctatgaacagcccacagggctgttcatccagcgggagcacaccatatatgggctaattgcccatctggcgcagaaacgcttctgcttctttgactagttgttcggcctggggcgctcccaaggaagcctccgcctcggctttctgctgcaagtcgtagtcgtgctccaaatgctccacgtaatcgtgaagctggtcattacaacgaaccagtatcgaggcttgcgccttccactgttcggctttctgcttcagatctgccgtatcgaaggtgaagccgatatgcttgtccaacgcatccagcaatcgcatagtgccggcagaacattcgtcgctgcccaaatattgggggatggacacccacatcgaggaatgagcaaaaccttgctgcgcggcggccacatccaaaacggtaggaatgcctaccgggccgttatacgaccggtctccttcgcattgacagtctccgtcgctgacggcgatgggcaacggacgggtatgcgggcaatcggagaacatcgaacctaacgtaatgatccgattgacatccagctcatcggcaatggccagactctggctacagtattccttccaccgatagttcggttcgggggcgatctgcgcatagatatgcttgcctgcgtccaacgtgatgtcgtagaacgtggtctgcggccagataagattggtgcgtcccgcaacatggcacagcataggacgggcaacctgatagtcatagaaatcatcacatctaatatgacgaatctcgcgggactcatatcgcttgaccagatggcgcaccgcgttcgtcgccgcctgacaggcatcattccatccctcgaatgcggcgatcaatactgcgccggtgtccttcgctgcttcactcatacctctagagtaactggaattcattgcccgaagcgcacgctttagccataagcgagagtatgcaattacaggcgacacgccgcagctggacgaactacacgcatgtgagtatagtaaacactcgtgcttcggcagggagacctcgccaaggaaacacacgcggacatagcttagttggtaaagcgcaaccttgccaaggttgagaccgcgggttcgagtcccgttgtccgctctaggtccgtgagttgacagaccttacggtgggttagccaagcggttaggcagcggcctgcaaagccgtatagacgagttcgactctcgtacccacctctcagaccagcgaagcaattcaatgggatgaaatatgacccgggcggttggcgcagtggtagcgcacttccctgacacggaaggggtcacaagttcgaatcttgtatcgcccacgaaagtcgaagcaattcgactggatataactgaagaaccgagtattcgggcgattggcgcagcggctagcgcacttcgttcacaccgaaggggtcgtaggttcgattcctacatcgcccactggattccgcttctcacggcggattcctttgcggacatagcttagttggtaaagcgcaaccttgccaaggttgagaccgcgggttcgagtcccgttgtccgctccacaacgaaacctcgcttcggcgaggttttttcgtattggttcagatgctggtggtatttgtcgcacgcccaacctatcgtgtcctacgttgattaaccagtccaggcctgcacattagtatcgtgggccccgatagcaaaggacaaatcatggcgcaagctaccatctccataaccgtcaacggcgaagcgaaggaggtggaagcaaccaccaccggcgtagaactgttcgcggaagacaagaacatcatcgcggtcaagatcaacggcgagaaccgtgacctgtacacgccgctgaacgatggcgataccgtcgaccccatcgccctcgactccgaagacggcctcgcaatcatgcgtcactcggccacccacgtcatggcccaggccgtgcaggaagtctacccgaacgccaagctcggcgtcggccccgtcatcaaggacggcttctactacgacttccaggtcgaccagcccttcaccccggacgacctcaaggacatcgagaagcgcatgcagcgcatcatcaagtcctcccagtccttccgccgccgttccgtgactgaggaagaggctctgaaggaagaggccgaccagccctttaagatcgaactgatcgaagacaaggaagcacacctcgacccggccgccgccaccgagatctccgaaaaggagctcagcttctacgacaacgtagaccgtgatggcaatgtggtttggaaggacctgtgccgcggtccgcacctgccgaacacccgctacatcaaggccttcaagatcgagcgttccgccgccgcctactggcgtggttccgagaagaacccgaccatgcagcgcatctacggcaccgcgtgggccaccaaggaagacctcaaggcctaccagacccgtctcgaggaggccgccaagcgcgatcaccgcaagctcggcgccgagatggacctgttctccttcccggatgaaattggccccggcctggccgtgttccacccgaagggcgccgccgtgatcaacgcgatggaggactactcccgtgagatgcaccgcaagcaccactacagcttcgtgcagaccccgcacatcaccaagggcggcctgtacgagacctccggccacctgcactggtacaaggacggcatgtacccgcccatgcacctcgacgaggagaaggacgcggacggcaacatcaccaagccgggcgccgactactacctgaagccgatgaactgcccgatgcacaacctgatcttcaagtcccgtcagcgctcctaccgcgagctgccgctgcgcctcttcgagttcggcaccgtgtaccgctacgagaagtccggcgaggtccacggcctgacccgcgtgcgcggcctcacccaggacgactcccacatctactgcacccgcgagcagatgaaagacgagctcaccagcctgctgaccttcgtgctgaacctgctcaaggactttggcctgaccgacttctacctcgagctgtccaccaaggacccgaacaagtacgtcggctccgacgagatctgggaggaggccaccaacacgctcgccgaggtcgccaaggaatccaacctcgagctcgtcgacgatccgtgcggcgccgccttctacggcccgaagatctccgtgcaggcccgcgacgccatcggccgcacctggcaggtctcgaccatccagctcgacttcaacctgcccgagcgtttccagctcgagtacatcgcgcaggacggtacccaccagcgtccggtgatgattcaccgcgccctgttcggctccatcgaacgcttcttcgccgtgctgctcgagcactacgcaggcgccttcccggcgtggctggcccccgtgcaggtgctcggcgtgccggttgccgacgagttcgccccgcatctggccggtttcgtcaagtcccttgaggacgagatggtccgttgcgagatcgactactccgacgatcgcttcggcaagaagattcgcaacgcctccaagtccaaggtgccgttcatcctcatcgtcggtgaggaagacatgaacaacaacgcggtcagcttccgcttccgtgacggcagccagctcaacggcgttccggtggacaaggcccgcgagcagatcctcaccgtcatcaagaagcgcgtccaggtgaactccgccgacgacttcaacgccgctgtggctgagtgatgtgaatggtactggctcccctctctgaggggagccaagaaagggtgcgaaaatgactgacgtgcgtgtcgataatccggcggactttccgcctcaggaggacacggtcgaacgactgtggactccgcagcgcatgacctatgtgctgcgcaacagcgaggatcgcccaaccaagcccaagacgaaggaatgcccgttctgcgctggacccaagaaatccgacgaagacggcctcatcgcctggcgtggcacgcacgtgttcgccatcatgaacctctacccatacaatgtcgggcatctcatgatctgcccgtaccgtcacgtcggattcatcaccgaactcgacgatgccgaactgttcgaattcgagaaggccaccaccctcgccatgaaggtgatggaaaccgtctcccgtccgcacggttacaatatcggcattaatcagggcgaagtagcaggcgcaggagtcgccgctcacctccatcagcatgtagtgcctcgctggaatggtgacgcgaacttcatgcccatcgtcgcccagacacgcaccatgcctattctgctgtccgaccagcgagaagcctatgcccaggcattcgaacagctggctccgcagtatcatctgccgcttgcctaacacaggtgcggcaccccgcgtgaccggtcttatcggtacgcataacaagacaatcatcggaaacatcacgggtatgtctgattaacggcctacaatcgtttcgtttgacatcatccgtttcaataattgctaggagcattatgtcaggtcattccaagtgggcgaccaccaagcacaagaaggccgccatcgacgccaagcgcggcaagctcttcgccaagctcatcaagaacatcgaaatcgccgcccgcctcggcggtggcgacccggacggcaacccgtccctgtacgatgccatctacaaggccaagaaggcctccatgccggccgacaacatcgctcgtgccgtcaagcgtggtgccggtgctgaagacggcgccgccaactacgaagacatcgtctacgagggctacgctcctgccggcgttggcctcatcatcgaatgccttaccgacaaccgcaaccgtgcggccgccgaagtccgttccaccctgaccaagggcaacggctccctggccacctccggctccgtgtccttcaacttcgagcgcaagggccagatcgtggtgccgtccgagggcgtggacttcgacaagctgttcgaaaccgccgccgaagccggtgccgaggacgttaccgatgacggtgaggtgttcaccgttgtgaccggtccgtccgacctgttcaccgtgcgcaaggctctgcaggacgccggcttcgactacgattccgccgaccaggtcatgcagccgaagaacgaggtcgagttgagcctcgacgatgcccgcaaggtgtccaagctcatcgacaacctcgatgacctcgacgatgtgcagaacatctactccaactggaccgcttccgacgaggtgatggcccagctcgacgaggagtaatcctcgtgattatccttggcgtcgaccccgggctcacacgttgcggggtcggcgtgatcgaagccggcgagcaccgccggctttcgtttattcacgtggacgtggtgcggtcctcaccggatatcacccaggatctgcgtctactggccatctacaacggcctgtccgagaaaatggatcgcttcgcacccgatgccgtatccatcgaacgagtgttcgcacaatccaaccgcaacaccgtactcggtaccgcacaggccgccggcctcgccatgctcgccgccgcgcaacgcaatattcccgtggcgttgcatacgcctaccgaagccaagctggctatcaccggtaacgggcaggcgcagaagattcaggtggagcgtatggtgacacgtattttgaacctcaccaaaatgccgactcccgccgatgccgccgatgccttggctttggccatttgccatgcgctgcgcccggcaggcgcattgcagggcggcgaacgcgaacagcatctgaccgccgcgcaacgccagtgggctgaggccgcacagaaatccacgcgccgccgcatcaaccacgaccgaggcatgtagtatactttcgaacagttgttcgagtcttgaatcctggagccctgaaggagtacctgtatgatcggcatgctgaccgggcgggttgaatcggtcgaaaccgataccgcattgattgatgttgggggagtgggctacgaagtgcgcatgtccgccaccgacctgagccgtctgcacgccgggcaagacacccgcgtcttcacctatatgaacctctctcaggatgccattaccctgcatggattcctggatcgggacgccaagaaaacctttctgcaactcatcaaggtctccggcattggacctaaagtggcccaatcgttactctccacactgacgccgagtcagctggcccacgccatcgccgacaacgacgccaccacgctggccaaggctccggggctgggcaagaagggcgcacagaaaatcatcctcgagcttaagggctctattgatttgagtcagatcgagggtgcttccgctcaggcggcaatatccaagtctccggtggataccggtacggaacaggttgtcgaagggctgatttcacttggctggcgtcagcaggacgcccagcaggccgttgtcgaggcttgcgccgaaaacgatattcccacgccgcttgccaccgacgatgtgccgcgtgtgctacgtctggctttggcgctgatggataggggccgctgatgagcgagacaacggattacggtacctcaaacaccggtgccaacgaagagtcgttgcgcatggtctcctcccagccgatcggcaacgagccggtcagcgacgaggagctgcgcccccatgttctcgaaggctttatcggacagccacggctcaaggcccagctgcaactgttcctggacgcggcccgcaaacgcgatgtgccaccggaccatattctgcttgccggccctcctggcttgggcaaaaccacgttggccatgatcgttgccaatgagcttgaagtgccgattcgcgtgacttccggccctgcggttcaacatgccggtgatcttgcttcgattctgagctccctcgacgtcggcgaagtgctgttcatcgacgagatccatcgtctgccgcgcgccgccgaagagctgctgtatatcgcgatggaggacttccgcgtcgatgtgatggtcggcaaaggcccgggcgcaagctccatcccgctgaccctgccgcgattcaccgtcatcggtgccaccacgcgcgaaggtatgctgccaagcccgttgcgcgcacgctttggcttcaccgcacatctcgacttctatccgcatgaggagttggaaaagctcatcgaacgttcggccaacgtactgagcgtaaaccttgatgcgggttccgctcatgagcttgcgttgcgttcgcgcggcacgccgcgtatcgccaaccgattgctacgccgtgtacgcgactgggccatcgtccacgacctgatcgtggtgcggccggacgacgtcaaggaggcgctggccctgtaccagatcgactccgaaggcctcgaccggctggacatcgccgtgctcaatgccatcgtgcgcaacttcaacggtggacccgtgggcctgaacaatctggcggccatggtgggcgaggaatcggaaaccgtggaaaccgtgtgcgagccgtatcttgtgcgcgaaggttttatgattcgcacgcccaaaggccgcgtggctaccgagaaggcatggcagcatttgggaattacgcccaaagatgatgtcagcaagctcttctagactttctcctgtttgcacacttggcggcgtttcgtcaatgtcgctcgtttgaaggagttgtttcgtggaacaacagtacattatgctcatcgtgatcgtcgtcgtgttcggcggcatgatgtggtggcagtccaagaaggccaagcagcagcagcaggagaagcaggacttccgtcgcaacctgcagcccggcaccgaggtcatcaccatcggccaggtgatcggcaaggtcgtcgaagtcgacgagcagtatgaggagatcgtcatcgactccgaaggctccaagctgcgtttcggcttcaacgccatcgcccgtgagtacacccgcccggcctatgtgtccgatgatgaggtcgacgagaacggcaacccgctgcccgacgaagacaccgaggctccggctaacgatgaggctggtcaggttccgatcgaggcgtccgtcgtgtccgaggaagacaccgctgacgagaccggtgacgacaacgaaaccaagacgaagtaagctgttcgattcggtagcaccatccgagtatcgcatcgcaaaggcataaaaggggcgagcactatggcacagtcggacatcaccatcgacgcattgagcaaggtagggcaacaggacgccgaatatctggtgtccttggtgcgttccataccggggtttcccaaggaaggcattatcttccgtgatttcatgccagtgctcgccgaccccaagggcttgaagattctgctcaaggcgcttgaaacggctctgccggtgtccccgagcgaattcgactccattgccggtctcgaatcgcgcgggttcctgttcggcccggccatggccgcccatctgggcaagggtttcatcgccgtgcgcaaggccggtaaattgccgcccgaaaccatcggtgaatcctatgacctcgaatacggcacggccagcgtcgaaatcgaaaccgacgccgtacaggcgggggagcgagtgctcattgtcgatgatctcatcgccacaggcggcaccgccaaagccggcgccgaccttatcgaaaaggcgggcggcactgtggtgggcttcagttttgtgatgcggctcgatggtctcgacggtctggataagctcggcggcaagcccagcagctcgctgatcgcgatgccggcctgagattccgtctcacccaacgtacagttagttttcaaggtccggcatgtactgtgtacagttatatgccggaccaattacatagtcagggaaggatcgatggatctttacgaataccaggcgcgtcagttgctcgaggaacaggacattcccaccccggacgccatctttgcccagaactcccatgaagtcgccgaagcggcggacaaaatcggctatccctgcgtaatcaaggcgcaggtcaagatcggtcatcgtggtcaggccggcggcgtcaagatcgcccataaccgcgacgaggcgattcttgaatccgagtccatcctgccgatgaccatccacgggcacaaggtttccggcgtgcttgtggccgaagccaagaacatcctgcacgaatattacgtgtccatctccgtggaccgcacctcgcgcgacttcgacgtgctggccaccgccaacggcggcaccgaagtcgaggaaatcgccaaggaacatccggaggccgtcaagcgcctgcacatcgatgcgctcggcgacttcgacctggccgctgccaccgaaatggcacagagcatcggcttctaccacgcggacgtcgatcaggccgcacagattctgctcaagatgtggcgctgcttcaaagacaacgatgccacgctcgtggaaatcaatccgctcgccaagatcggcgacccggatgacgaatccaccaagcagctgagcgccttggacgccaagatctccttggatgacaacgcctccttccgccatgatggctgggcgcgtttcgtggatctcatcgttcccgaccccttcgaacagcgcgcccgcgaacacggcctgcactacgtgcacctgcacggcgaggtcggtgtgatcggcaacggcgcaggactcgtcatgagttccctggatgccgtctccggcgctggcgaggaacagggcaccaacatcaagcccgccaacttcctggacatcggcggcggcgcctccgcagccgtcatggccgaaagcctggagatcgtactgtccgaccctcaggtcgaatccgtgttcatcaatgtctatggcggcatcacctcctgcgtggaagtcgccaacggcatcctcgaagcggtcgccaagctcggcggttccaagccgatcgtcgtgcgtttcgatggcaacgccgccgccgagggtctgcatatcctcgcttccgccaacaatccgaatatccatgtgtccgaaaccatggaaggcgcggcagccaaggccgcgcagctcgccggtgaggcgacccagtccaaggaggttcgctgatgctgttcatcgaagacggcgctcccgttatcgtccagggcatgaccggccatcagggcatgacccacacggctcgcatgctcaaggccggcaccaatatcgtcggcggcgtgaacccgcgcaaggccggcacatccgtcaccttccccggtgccaagaacggtgccgacgtggacatccccgtgttcgccacctgcggcgaagcacgtgaagccaccggagccaaggccagcgtggtgttcgtgccgccgaagttcgccaagtccgccgtggtcgaagccgtcgaagccggcatcgaactcatcgtggtcatcactgaaggcattccggtggccgattccgcatacttcgtcgaactggcgctcaagaagggcgtgcgcatcatcggaccgaactgccccggtttcatcacgctcggcaaccctggcgtcaacttgggcatcatccccgacggcatcgtcggccgcggcccgctcggactggtctccaaatccggcaccctcacctaccagctcatgggcgaactgtccgatatcggcttcaccgcatgtctcggcgccggcggcgatccgatcgtcggcacgacgctgctggaagccctgcaggcattcgaagccgaccccgacaccaaggctgtcatgatgatcggcgagatcggcggcttcgccgaacaggacgccgccgcatgggccaaggagcacatgaccaagccggttgtcgcctacatcgccggtttcaccgcccccgaaggcaagcagatgggccacgccggcgccatcgtctccggaggcaagggcaccgcccaggacaagaagaacgcgctcgaagcggcgggtatccccgtgggcaagaccccgggccaggccgctgaaatcatgcgcgacatactcgccaaggccaacatcgactgatcggttccaaccaatcgtgatgaaagccgtgattcgccaatgggtgcggggagccatagtcgccctcgcatccatggccatctatgccgttgcattaggttgctatacagcgctgatgttattggttgtctccatggaagagggcggcgacaatctcaccgtcggcacaacctcgctgacacaggccgttgtgcttctgagtgagggatcgggctctagaaccgattcgttcaccctcaccatcacgccattgatgttgaccatactgctgatatggctgatcaatgcagtcaccatgcgaatcaaagcatacgggccgcatgcgtatgttgccggattgaatgtttggctcgggttgaacgaggcattccggcaatccgtacacctaggtcttgtcgatgaccagtggctggtgttgctgaaagcagccatcgtattctcgatcggtttcctatgcgcagccgtaccggaatcagccaagatgcgagcattcagggactggactcgcaagcaggtgccggcggacatacgccactgcctgaaaatcggcgtcgtcttggccgtcgcgatactgggcatatacctggcaattggattgattaccgtcatcgtatgggcggtacgtaaccatgccgctgtcgtatcgttgttcgaattgtccgggatggaaaccggttcacgaattctcaccaccgtcgccatgctgatctggctacccaacgtcatgctctgggctgtttcctggctcttcggcggcggattcgccatcggtgatttggccagtttcacgttatggctcggccaatccaaagagcttcctgcaataccggcattcggtattctgcccgaaccggtcagcagcgaactatggcgtaccgttgccttgaacgcgcctctcgccatcgctgcgctcgtgggcctgctggctgtattcctaccgcaaggattcgcctgcagaccgttgaatatacggaatgcgtccacccgcggcccagtactggtttcgctgatctactccgccgggtcattctgcctgagcgcgatgctgatctcactggcatccacattgctgttcgctctgtccaatggatcgcttggcgatcatcgtctcgctcacattggcgtcgacgtcatggcctccaccagagtcgtcggtcattcgaccgcattgggatttaccgcggcatggctgctcgcgctgattggcacagtgctcgttttttcgataggctggttggttgggaggatcaatgattcccgcaccaccgccgcgaccccgaagaccgtcatcgtccgtcaggcgcggtccctggcgtcacaaccacaagaatccaaggaggaacaggatgacaaacacgaaccgaccgatacgtcgagcactggtctcggtctttcataaggaaggcatcgaagtactcgcggaagcgttcgtgaaggccggcaccgaagttgtttccactggttcgaccgccaagaagcttgccgaactgggcgtcaaggtaaccgaggtgtccgatgtcaccggattccccgaatgcctcgacggccgcgtcaagacgctgcacccgtacattcacgccggcattctggctgatatgaccaaccccgagcacgccaagcagctcgaggagttcggcatcaagccgttcgacctggtggtcgtcaacctgtacccgttcgccgacaccgtgcgctccggcgccaacgaggccgataccatcgagaagatcgacatcggcggtccctccatggtgcgcggcgcggccaagaaccacgccaccgtggccatcgtcaccgacccggccgattatgcactggtcgcctcccgcgtggccgacggcaccggcttctccttggacgagcgcaagtggcttgccgccaaggccttcgcgcacaccgccgcctatgacgccaccatcaacgagtggaccgccaagcactggcccaagccggcctctctggacgccgtcgaggtggacaaggacgatcagggcactgaagtcgattccgccaagttcccggcccagttcacccgcacctgggatcgtgcgcacaccctgcgctacggcgagaactcccaccagcaggccgccctctacatcgacccgctcaaccagaccggtttcgcccacgccgagcagctcggcggcaagccgatgagctacaacaactacgtggacgcggacgccgcctggcgcaccgtatgggatatggctcccgccattgccgtggccgtagtcaagcacaacaatccgtgcggtctggccatcggcgcgaccgcggccgaggcccacaagaaggctcacgcctgcgacccgatgagcgcctacggcggtgtgatcgcctgcaactccaaggtcacccttgagatggccgaaagcgtgcgcccgattttcaccgaagtcatcgtcgcccccgactatgagccggccgcgctcgaactgctgcagaccaagaagaagaacctgcgcatcctcgaggtggccgagccgccgaagggccacgaggccatccgccagatcgatggcggcctgcttgtgcaggacactgatctgatcaacgccgtcggcgacgatccggacgcctggaagctcgtggccggcgaggccgccgacgctgacacgctgaaggacctcgtgttcgcatggcgtgcaatccgctgcgtgaagtccaacgccatcctgctggcccacgaccaggccacggttggcatcggcatgggccaagtcaaccgcgtggactcctgccatttggccgtcgagcgcgccaacacgctggccgatggtgccgatcgcgccaccggtgcggtcgcggcatccgatgcgttcttcccgttcgccgatggtgcccaggtgcttatcgacgcgggcgtcaaggccatcgtgcagcctggcggctccatccgcgatgaggaggtcatcgaagcggccaagaaggccggcgtgaccatgtacctcaccggcacccgccacttcttccactgatcgggactctctgaggggagcagctcagccaaaacgcacaaaggtgggattccgcctgacccgtcaacgggtccaagcggaatcccacctttgctattcgcctgctattgtggtcacgtaaccgttcgacagaaggaatcgcaacatgcacaaccatccctatgtatccgaagcacatgagggcaagccatggtttgaatggtgcgtactcggcgtcgtcgccgtcatcacactgctggttgctttcggatatacgatggccgccacggtcatacttgccgtgacggccatcatcaccgggcttgttcgtctgattcttcaggacaaaagcccatggaaagtgcgctcagtggcgttcgactccttcatcggcatcgccttgggaatcggcctgctgattacctacttcagcttctttggactcttcggcaacatctttttccgctgaatcgccatcagacgaggtggcctgatcgaagaattcgccatcgtcgagcgtgtccgcgtttgcatcggcatccatctgcggaagatcggcggcagccggcactttgggagtggtcatcatctgcgcgatgatcatgaccaacgccaccacagaggcggccaagaccgggctaatccagaatacccacagctgctgcagcggattttgcgtaaggccctcattcatcgcggccagtgcgataccggtggaacgggcgggattgagaccggcaccggtaaccgggtagctgatggcggcggccagaccataggcaagacccatggcaatgatatgacggtccgaggactcgccgtgatcacccagagaagacatggcggtggcaacgacaatcagagaggcaacgacctcgacgacaatcgccaacgtaatcgagaacgtaatgccatactgggtcagcagcgagtaagacacggagccgttttcgaaaccgttaacggccggagtcagccacactttggcagctacctgctcggatgtgggcagcagcttgaccacggcgaagccggcggcgatggcaccgatgacctgagcgatcacatagaggatgccatccaggattttcgtcttggaaaccagcacggaggctacggtgatggccggattcagctgaccaccggacacgcgggagaagatggcggtgactgcggcatatgccaagccggtagccaacgcgaagaacacgatattgatgccatatacggccgaaccccatgtggagaaggcgtaaatcgcaaagcacagcaggaagctgccggccgattcggcgcacacgcgcagagccagcggctgttgcttggtttcttccatgattgttcattccttttcatctgttggaagacgggcgaacccgcacaaacggttgccagtctagcagcagtcctacgttgcggtatgatatatgagttggaattggctgggattccagtccgccaactctaaagtatgtatacaaatcgacagtctctgcgatgacagaatctgtccggccacgttgggagaacgatgccaaacgcatattcccgcgctgcgaaagcgcaagacgattccaattccattcgactccagaagctgcttgcccaagcgggattcggttcccgccgcaagtgcgaggacatgatcaccgaaggccgtgtcgaggtcgacggtgaactggtcaccgagctcggaactcgcgttgaccctcataagcagcaggtgcgcgtagacggttcgcgcgtacgcgtcaatccgaaccacgtcactctggcactgaacaagccccgcaaggtgctctccgccatgggcgatccgaagggccgctacacgttgcgtgacatcgtgggcgacaagtacgagcgcatcttccacatgggccgtctcgactacgattccgagggtcttatcctcatgacgaacgatggcgaactctcgcagcacgtcatgcaccccaagtacgaggtcgaaaagacctacgtcgccacactggagggcaagatctccggtaccgtgtgccgccgactcgtgaccaccggcgtgcagctcgatgacggttggatcaaactcgaccactgtgccatcatcgactcctcacgcgaccacacgatggtcaaggtcgtgctgcactccggcaagaaccgcatcgtgcgccgcatcttcggttcgatcggtttcccggtcaagcgtctggtgcgcacccagatcggcccgatcaaactcggtgatctgaagcccggttcctaccgcgtgctgtcccagacggaagtccgttcgctgtccaaggaggttggcctgtgattcgcgttgccatcgacggccccgccggcgtgggcaagtcgtccacgtccaaggcgctggccaagtatttcggatacgcttaccttgacacgggcgcgatgtatcgtgcctgcgcttggtggtgcttgaagcagggcatcgatctggacgccgaaaccgtggatgagcgtgtcatcaccgaagcggtgggcgagttcttcaccggcgaccatttcgatatctccgtggacccggacaacccccgcgtattcgccgacgacgaggacatctccgaggccattcgttcctccgaagtctccagccatgtctccaaggtgtcgaacgtcatcccggtgcgcaacgtgctcatcgccgcccagcgcgcctacatcgcccgcgaggcgtcggccgactccttctccgggggtttgggcatcgtggccgagggccgcgatatcaccactgtggtgtccccggacgccgaggtgcgcgtgctgctgaccgcccgtgaggaggtccgtcaggcccgtcgcaccggccaagccgtcaagggcgtgggtgctgaggatgtggctgcgcgcgacaaggccgattccaaggtcaccagcttcctgaccgccgccgatggcgttactaccatcgacaattccgatttggacttcgcccacacgctcgatctgctcatcggtctggtcgaggacgccatcgagaaccaggagtacgagcagtatgccgccaatctcgaaggttatgagttggacgagggcgatgaggatctgatttccggccgtggtttcacggaaggcgcgcgcaaggccggccccaagccggtgggtgtgctggctgttgtaggccgtccgaacgtgggcaaatcatccttggtcaaccgtatcctcggccgccgtgccgccgttgtggaagacacgccgggcgttacgcgagaccgtgtgagctatgacgcggaatgggccggcaccgacttcaagctggtggacacgggcggctgggaagccgacgtggaaggcattgaatccgccatcgcctcacaggcacaggttgccgttaccttggccgatgctgtggtattcgttgtcgatggtcaagtgggcatgaccaccaccgatgagcgcatcgtcaagatgctgcgtgccgccggcaagccgatcgtgctggccgtcaacaagatcgacgaccaggccagcgaataccttgccgccgaattctggaagctcggcctcggcgaaccatactcgatttccgccatgcacggcaggggagtgggcgacctgctggacgttgcgctcgacaagctcaagcaggccgagaagacttccggctacctcacgccttccggcctgcgccgcgtggctctggtgggccgtccgaacgtgggcaagtcgtctctgctcaatcagctggcgcgcgaagaacgtgccgttgtcaacgatttggccggcactacgcgcgaccccgtcgacgaaatcgtcaacatcgatggcgaggactggctgttcatcgacaccgccggcatcaagcgacgccagcacaagctcacaggcgcggaatattattcctctctgcgcacgcaggccgccatcgagcgctgtgaattggcgctgatcctgtttgatgcatcgcagccggtatccgatcaggatttgaaggtcatgtccaccgccgtggatgcgggccgtgcaatcgtgctcgtattcaacaagtgggatgcgatggacgagttcgacaagcagcgtctcgaacgcctgtggaacaccgaattcgaccgtgtgatgtgggccgagcgtgtgaacctgtccgccaagaccggctggcacaccaaccgtctgacgcgagccatggataaggccttggaatcctgggatcagcgtattcctacaggcaagctcaacgccttcctcggcaaaattcaggccgcccacccgcacccgttgcgtggtggcaagcagccgcgaatcctcttcgccacgcaggcatccacgcgcccgccgcgtttcgtgatcttcgccaccggcttcctcgagcacggctaccgccgctacatcgagcgttccctgcgcgaggaattcggcttcgaaggcacaccaatccagatctccgtgaacatccgcgaaaagaagaagcggaagtgacacgcgcgtaatttgccagatttcatatatctggtagattatctactcggtgcttttgcaccatcgggccgtagcgcagtttggtagcgcacttgactgggggtcaaggggtcgcgggttcaaatcccgccggcccgaccgattagccccggaattccgccacttttgagtggttgtcttccggggcttttccgttttcagacaacataacgacggacttacctttgtaagccattcgtaatggattaaacacggacttcatcttggcgtgttattggaattatcaccgacaattcaccgcctccgcaccccccgtcgtatgcgtttgccccaaacagggactagacttgttcctattgatttgacgaaagggacccgaattgaccgaaataaacgataaggcccaactggatatcaccgccgccggcgacaccgacgccgtcacctcggatacccccgaagaaaccgtaaacacccccgaagtggatgagactttcgagctttcggccgccaagatgcgcgagcatggcatgagcgaaaccgccatcaaccagttccgccatttgtatgacgtatggcgccatgaagaagcctccagctggattcgcgaggacgacatcgagccgcttggccacgtgcccagcttccacgacgtctatgagaccatcaaccacgacaaggccgtggacgccttcgccaaaaccgcattcctcaagctcaatggcggtctgggcacctccatgggattggacaaggccaagtcgctgttgccggtgcgtaggcacaaggccaagcagatgcgcttcatcgacatcatcatcggtcaggtgcttaccgctcgtacacgcctgaacgtcgagctgccgctgacgttcatgaactccttccacacttcggcggacacgatgaaggtgctcaagcatcatcgcaagttcagccagcatgacgtgccgatggaaatcatccagcatcaggaacccaagctcgtggccgccaccggcgaacctgtgagctaccctgcgaacccggagctggaatggtgcccgcccggccacggcgacctgttctccaccatctgggagtctggtctgcttgacgtattggaggagcgcggcttcaagtatctgttcatctccaattccgacaatctcggtgcgcgcccctcgcgtacgttggcccagcacttcgaaaacacaggtgccccgtttatggctgaagtggccatccgcaccaaggccgatcgcaagggcggccatattgtacgagacaaggccactggtcgcctaatactgcgtgaaatgagccaggtccatccggacgataaggaagcggcccaagacatcaccaagcatccttacttcaacaccaactcaatctgggttcgcatcgacgctttgaaagacaagctcgccgaatgcgatggtgtgttgccgttgccggtgattcgtaacaaaaagaccgtgaatcccacggacccggattccgaacaggtgattcagctggaaaccgccatgggcgccgcaatcggtctgttcaacggttctatctgcgtccaagtggatcgtatgcgcttccttccggtgaaaaccaccaatgatttgttcattatgcgttccgatcgattccacctgacggacacgtatgagatggaagacggcaattacatcttcccgaacgtcgaacttgatccgcgatactacaagaacatccacgatttcgacgaacggttcccctacgccgtgccatctttggccgcagccaactcggtttccattcagggcgactggacattcggacgtgacgtcatgatgttcgccgacgccaaactggaagataaaggcgagccaagctatgtgccgaacggcgaatacgttggtccgcaaggcatcgaaccggacgattgggtgtgatttacaacacggtcgaacgataaaaaagatattatttttgtgaaatggcgctcaagtgcggaaaaagcctctaagatagagtgagcgtgaggaaactcatacgcacttataacgaaacaataactatacgtgaggactaatggcagagggcacaagcggacgtcggcgtttttccgacaaatggggcaagcacgagctggacgtactggctgtgttgtcatccgcgttcccgcaatggctcacatcccgccaaattgcgcagcgcgtcaaggcttacgccgactcgtatggagagctggcagatcaggccgccaaggccgcgttcgccaagcagttccagcgtgatcgcgccaagctcgccgctatgggcatcgccatcgaatcacggcagcctgagtattcgtccaagtcggaaggccaggacttcgcgtcctaccgtctgcagttgggcgacgaaccgcgcatccgtctgatgttcgagccggaagatatgccggtgcttgccgccgccaactatctggctcgttcgatgtcgatttcctccgagccggatcagtcccagctcgcccaacatgcgtcgcgcaccacgccgcgtgtgccgcagacccctattcccggtctcggtttggattcgattgcgcctggcttgggcacgcagcccattccggactcgctggtcaaggttatcgattcgcgtcgctttgccgccaccgttgatgtggacggcgaacacctgaacgtggcctacaccgattccgacgatttggccatgtttgtgctggagcatccgggtgccacgattgtcagcccgcaggaggctgtggacgcctatcatcgccgcctgcacgccgccagccgattcactctggctgacgaatccgccagccctgtaagcgcctcggtggtttccccgtcgattagtcgcgatgttcgtgagccgggtgatcccgagtcgatcaaggcccagaacaagaagaacggccccgctttccaaacgggcagcgaggtggatcgtcgcctgcgtctgatgctgttcctctccgctcacctgggtgaggaattctcgatgagcgagctggccgagcgctttatcggcaaaccgaagaacgacgacgagctcaagaaattcgtcaacatcattcataaggacatcaacaccctgaccaccgtttccgacgatggtgagatggctggcagccagttcttcgatatcgactggccgctgctggatgccgagggtattgtttccgccaccaattcgttgggccttgaacgtcttgccggcatttcgccgcaatacctcagcatgctcaccgcctcggtcagctacttggcgcattcgccgttactgccggacaagcagcgtgggcaggccgaatccctgtatgagcgtttgcgccgccatgtcagcccgggccagaccccgtggctgagcctgaccggctatgagctggagccccgaagcttctccatcgtcaagcgcgcgatcaacaccgattcgctgttggacatggagtactccgacggtaccggtagtacccgtcgcaagctggtggcccccgccaagattttcatcgacgaaggcgtgtattatgccgccgtctacacggatgtcggttccgccgcccctaaggacaagaaggcctacgtctccaaagacaagaccatcgacaaggcgaacggcaagccgcgcatctggcaggtgctgcgcttggcccgtatcgaaaaggcggaactggtcaagcccaccaagcagatcaacatcccgaacatgccggtgagcgaactgcgcaagtggagtttcgacaacggtaccgacgcggtgttcatcaccgatcagcgcgatctggcattcatcaagacattgccgggcgctaccgtcgaacaatgcggtgccggtgaaaaggtgcatctgaccgtttcctccgactcctggttcgtggccttctgcatcgcacacgcgcgtcatatcacggcggtcgccccggaaacgttgcgcaccatgatcgtggcacgcgccgaacgcgaactgagcatcagcgagaacaagtaaggagcctttcatgccttggtggatatggctgattctggccctgttcatgctggccatgattgttgccggactcatctatgcagcccttcatggaatccgtgccttgaaagacatgtccgacatcggcggccagctcggtgaacgcgtggccgcgatgggggagtctggcacctctgccgacaccagcgagccgcctctgttcactcagccgctcagcgtggcacagaatcgttatgccgaggcccatgcggacgtgattcgcagcaaggccgccaagcgcgaacgccacacccaggcatgggaccgctggaagcgattcaacaactaacggaaagcagcaatggcacgtcaccaacaccataagggcaatgccgattcccagacgctgagcccttcgcagcggtacgcatcattccaaaaagtccagcgccatcgggcgtccgcagcagcgcgattcgccgaatccctgcccttcgaactggacgacttccagaccgaagccaatgacgcgctcgaagccggcagcaacgtactggtcgcggccccaaccggtgccggcaaaaccgtagtggcggattttgccatttatctcgcccaggaacgcaacgtcaaagccttctataccacaccgatcaaagcgctgagcaatcagaaataccatgatctggtcgacgtgtacggcccggacaaggtaggcctgctcaccggcgacacctcgatcaactccgaggcggacatcgtggtcatgaccaccgaagtgctgcgcaacatgctctacgagcgttccaccacgctgaacgcactgcgctacgtgattctcgacgaagtgcactatctggccgaccggttccgcgggcccgtgtgggaggaagtcatcatccacctgcccaagacggtcaagatcgtcggcctgtccgctaccgtgtccaacgtggaggatttctccaactggattgcctcggtgcgaggcgacaccaaactggtgatcagcgaacaccgccccgtgcctttggaacagcacgtcatcgtgcaggcggacgaacacaccgagcctgaggtgctggatctctatcgccgcgacggcaacggcgagcagaccaccaagctcaacgccgaactcatcaaccggctcgaccagttggaccgcaaggccgcacgccggcgcggcgaggaacgccccgataagcgcaagggcttcggcagaggccgcggcggcaaaggcgccaagggccatgccccgaaagcggaacgccacaccccgcgccgctgggccgtggtggacgagcttaactttctgggaatgttgcccggcatctacttcatcttctcgcgcaacggttgtgaccaggccgtggaacagtgtatcaacgctggactggagctcaccaccgatgaggaagtgaccaagattcgccgcatcgtggatgagatggtggaggggcaactcactcaggaagacctgaaagccctgcagttctccaagttccgctttgcgttggaagaaggcttcgcttcgcatcatgccggcatgattgccctgttccgccagatagtcgaacgattgttcgaagaaggtctggtcaaaatggtgttcgccacggaaacactggccttgggcatcaatatgccggcccgctgcgtggtggtagagaaactcgagaagttcgacggtaccggtcatgtgggcctgacgcccggcgaattcacgcagctcaccggtcgtgccggtcggcgcggcatcgacaccatcggccacgccatcgtggttgaccatcacggttttgtgcccgccacggccgccgcgctgtcatccaagcgtgtctacccgctgcactcgagcttccgacccacgttcaacatggccgtgaacctgctcaactccagcgactacgagaccgcgcacgttaccctggaccagtcgtttgcccagtgggaggccaacgaatcggcctggcagctggaatcgcagatcaacacactgaagaacgcgctggccggatacgaacaggcgttcgcatgcgaacacggcgacttcaaacagttcatgaccctgcgtatggagctgagcgacatcgaaaaggaaggccgccgcaaactgaagcacgaagtgttcctgaccgatcaggagcgttcacgcgccttccagaaccttgaccagcgcattcgcgatttgcgcaaggcggagcacgagcatccatgccgcaactgcccggacctccagcaacacctcaagtggggccaccgctgggcccgcgagacccgcgaactgcagcgcgtcaccgatcgctacgactcccgtaccgggtccgtggcccgtcagttcgatcgcatctgcgatattctcaccgggcttggttacctcgaacgtcatgtcaatgcggccggccacattgacatgacgttgaccgaaaaaggctcgctgctgcgccgcatctacagtgaacatgacctggaactgtgcgaggcgctgctcgccggcacgttcgacaagctcgacgccaacggactggccgctgtgctctcttcactggtatacgaggccagacgcgggggagacggcgaaccgaggcactacccgggcggcatctccgggtccatcgcaatcgcttcgtccaagctcaagggcatctgtgaagacatcgatatcctgtgcgaggatcacggtctggacgagatgcagcggccggacttcggcattctcgacatcatgtatgaatgggcggatggcggttcgctgggatcgtgcctgtacggcaccgacatgaccggcggcgacttcgtgcgcactgccaaacgactggctgacgtgctgcagcagatcgctgtcgcccagccgctgccgttcgacgggggagagcggctggcaggcctcgcccacgaagcggccgaccgggtcaatcgtggcgtggtggcctactccggcgtggactgacggggggccgtttgatgggagtttgtcagccgacgtcggaagcttggaatagcggccaagtccgaactgttgcgtaaattagtagggttaaagatctttcaaggaggatgccgatatggcagaacgtagcctcaggggcatgagcatcggagcgaaatcgctggagtccgacgacaacgtcgatttcgccgcacgaaacgatgtggcgtatgtatgcccgaagggccaccgcaccatcctgccgtttgccgagggtgccgaaatcccggacgagtgggagtgccgttgtggttccgtggcccaccgtgagggcgacgccgaccgtgagggcgacgagatcagcaaacccacccgcacccactgggacatgctgctggaacgccgtagcgaagaggaactggccaccctactcgaaaagcgcctgcaaatgcaccgtgacggttggattcctgactacgagtgatctcctactgaacaacacgtgaacttgatgcccagtcatcccgactgggcataatcattgttggaacaagtcgcatatcgtttgacgaccattcaaagcagtcgacatgaacaaaggggagtggaatctcaatggcacagcatccgatgaaagtggtcctgttggacctcgacggcacgcttaccaagtccgacggcggcatcatcgcctccgtcgtcaagacgttcgaggaattgggtcgcccggttcccgacgatgccgagctgcatcgtttcattggtccggccatcatcgaatcgctgcgacgcaaccatgtgccggaggatgagcttgaccgggcggtcaccatctaccgcagctactatgcggatcgcgccgtgttcgatgatccgaacgagcccggcaacaaagttcccggccgcttggtgaacgtcgtgtttcccggtatccgcgaacagctgctcaagctgcgtgccgacggctattatctggcgttggccagctgcaagcccgagtaccaatgcgttccgatctgtgagcatttccatctgaccgagctgttggacggcatctatggcgcatccagggataactctcgtttggacaaggatcaggtgattcggtactgcttcgacaaaatcggttttgatgctgcagcgggggacaaggccgtgatgatcggcgaccgctacaccgacatcgacggcgcccacgcctgcaatctggacgccattggctgccgctggggctacgctccggccggtgagatggaagaacacggtgcctacgaaatcatcgagaagcccgagcagatcgaagaagccgtaaaccgttatttccaaacacactgaaacacaacggcgaggacttcttcatgatgggatgcgatggagcctgcgccgcgggcttcgacctggttttcatcggtttgccattgctgtcgctgtatgagattcccatgctgatatggttcatttggcgagcattccactggaaacgagatgacaaggattggctgaaaggcacggcgattcttgcaattgcggtggtcgctccggtgctcctttggctgtcggcctggtatgctccggtgctcctttggctgtcggccttggtatgcgtggactagttgatacaggcgaccgaatccttgtcaaggataactaatctgacataacgtacattatcggctaatagtatgtggtgattttagccgaaccagtagtatctagctgcggattagcctcgccgcagagaatcggctacttcgcaacatcatccttattccggtgagaagcaacgcccaaacgcttgtccatttcggtttccgaagcgttgcgtgcctgcagatacatggcgatgagttccagcagcaccagcacgaatatgatgattgctccgggcaattgcgcgtggtcgtagaacgcgagcatgcgagcatccatcagatctgcggtgaacgtcaatacgggaaacggaatcagcgccgccgcaaacgacatgaaatgcgttttcaccatcgaccagtcgaccggatcgaccggcggtcgccggcgtttcggcgtgaacagatggcctcggctgaccgttatagtgatgatggacacagcaaagatgacggcgaccatccacagaacgcccggcaacaatccgacaacaatcccgttcacccggtcctccaatcagtcataataatcaccgcaacatataaaaacataagatggcaggcaacaaaagcaacacatacaacaaagcgacctgccgaccaaagccggcaagtcgccaacaaccatacatgtatcaggcggttgcgcgtcgcaagcgctgtgcctcgagcttcttgcgcatcctcatggcggtcagttcatcaatcggacggcccgtggcaatcgtcagcggcttggcctcaagatcaacatattcttcctgttccaaggccgtctcaatctggtgccacaacgaacccaccgacacggcgaacactgccttaccgctttgcaacagttcgagcatctgttcgctggttgtgcattcatgtacgttttgaccatcgcacatgatggtcacattggccagctgatcggtgctgcgttgagtcaagaatccgatggccgccgtcacgttctgcagattcacaccggcatcaagcaacttcttggatacagcgagaatcaccacatccttaaacgagtatagtcgtcgtgaaccggagccatgagacggcgtaatggacggctcaacaatctgcttgcgtgcccaataatcgagctgtcggtacgtgatgccggccaccttggaggccacagtgccacggtagccgcgcttgatctcctcagtatcgacgttggagaacaactccccctgaatcgcgtcagcgttcagattctgacggtcctcaagcgaaacatgaagatgcagcccggtctgtcccatggcactcccctaactcatgcgtgtctcgcatatgactcacactggtgtaatcacatgattgcaatttctgcaatcagtctaaccccatgctaggtgtggactattgggaaataatggcggatttcgtgaagaacacgaggcggaatttaccgatcatgatttcgtcgccgttcttcagcgtcgcctgatcaacacgctgacggttcacgtaggtgccgttcagacttcctgcgtcaaccacaaagaactgaccgttgaccctgcggaacacggcatgctgacgggatacggtggagtcgtcgagcagaatatcagctcgcggatcacggccgacggtgatttcatcctcgtcaagcaagtaacgagaacctgagaccgctcccctggcggaaatcagcaatgccgttccctcggacaatctggtgatggtgtccagatcctcttgagtcagcggtcgatcgccggtggtggtaatgggcagtacattaatcgcgggcaggccgataatggtggtttcgcctgcgctaggaatcgggttggtcataatcccctattctaccgtctttgcatactggttttgcgtagcttcgcgtacttcgtcgataatgatgctgtcagaaggctgtacattgacgttggacccgtatttcacctggagctgagcgcccacaccgccggcgatatcgactgcgttggacagttcctgcggattgccaatggccttcaccgtgtatgtgggcttgatggtggtgccatccacgatcaaaccttcctcggcgtcctgaatgtaggtggaggtgatgacgcgcacgttattgatggcgattacctcggcaccggcattgcgaagttcctcgataaggttgaacatgattgaggcgtccactttagtcgtcaagcctcgtccgattcggatggtcacgccttgaccctttgccgggagtctgccggagatcaagccgctggtctcctcgttttgcttggcgatcttacgcgcctgctcctgctcgttagccgccgatttcagcgagttgagctggctgttcaactgggttttacgctgctcgagattggagatttgcgtattcgactcgttcagcagccttaccagttcactctcgtccatcgtttcgtacgtggatttagtgttattgatctggctcatgtaggcgaaacccaacaacgcgcacatcagagcgatgagaatcgaggatagtaaccgtgatttgttgctggcacggttgagatccttccggggcttcttacgcaccgtgggaaacgacccggtttccatccggtcgttgaccttgtcttgtgcatgctggtcgcgcattttctccagcatgttgtctgattgtgctttacgtgccatacgtcagtacccttgtcagcctcggaagatgaagcgtctgatcgcggacacgttggagaagatgcggatgccgagtacgacgatgacggctgtctgcagctgcgaaccgacgccgagctggttgccaaggaacacgagcagtgttgccgtcaccacgttggcgaggaaggagatcacaaacacgcggtcggagaagctgcgctcgaaataggctcgcgcggcacccagcagggcgtcaagagcagcgaccaccataatcggcagataaggctgcacgatgatcggaatgtccggcttgacgaacacgccgatgacgacgccgatgatcagtcccagaacggctgccattattcattcctttccgcgtacttcacttcgccagtgactgctgcctcaagtgtaatcgaattggatttgctcacctgcgggtagataccggcttccttgaaggaatcgtaaagacttgcaagtttcttctcccccatcgcttcggccaaggcgctcttatcgcctatggcttcaatggtataggggctttgtatcgcggtcatgccgatgagaatatgcccgccggccttgcgtatcgaggtttgcgcgccgagcctattaccgttgatggcaatggcttcggctccgttttggaacatcagggagaccagttgctgcagatccagatcggtgatgactcggatgttggtggaggtgccgactctcgtcgaggaggattgatccgactggcttgccgcgattggatcggccagtgtcatggtgattccttcgccttcgaccaccgtggcaccattgaccatttcgtcttggataagcgtgtcgcttttcacgctgccggagattttcttggactgttcgtcaacttgtgagcgcaaattattgacggccgtggtgagttcgtctatttgcgagttgcgattctccaattgcgtggccaaagtctgccgtacctgcttacgcggatcggattgcaactgttgcacgaataggctgtaggcaaagccaacgccgacgcagatgatgaatacgacgatgcgattaaaccagatggagaaggtcgaacgatgctcatggaccagtcgtgagtcggagaacatcggatccatcggacgattgacaagatcatcgatgagctgaagcgaatcgtcgttggttttacggcggcgtctggtgcggatggcggcggcgtcatccggggaaagcgcatgatgcgattccgcgcctcggactgagtgggagaacacggcgcggcgtcgtaccggctcattctccgtgggtacggggaatgagaccggggccgtggcctcaagcgccatacttctcccccagttccttgcgtagcaatctgatgccctgctcggtatagatatatccggcgagccaatacatggcgatgccccagatgccggcggccagcgcggcgatgtagagcaagtggaagaacgtattggtgcccaaatcggcgaaaatcagactgacgatggaaatcatcagcagcgcggtaccggccttgcccacgaaatgcacgggcagcggaccataaccgtactgggcaagccatagcacctgaatcgccatccacagatccctcagtcccacgataatcagcatccaccatgggatgatgccggcgacgctgagggccagaatcgagcagaaaatgagcagtcggtcggcgatcggatcaagaatctgaccgatcttgctcacttggttgaatctgcgcgcgatgatgccgtcgagtccgtccgaagccgaggaaatggcgatcagggctaacgccgcaatcatctcgtgcttggagatcagcacgctgatgaaaggaatcgagatgattcgcagcgcgctgatcaaattgggcacggtgaaatagatgtcacgtgcttccggactgtatctggtgttgactttctggttggtcatatcgactaacagtctacatgcgggaggcttgcagagcggtaacgatgatgccgcgtgcgccgacttcgtacaaatcatccatcagctggttgaccttggccttgggaaccatgactcgcacggcgttccactgtttatcgtgcagcggggagatcgtcgggctttcaaagccgggggtcacggccacggcggcagcgaccttgctgatcggaatgtcatagtccatcagcacatactgatgtgcagtgagcacgccttgcagacgtcgggtcagcacggccagacgtgagtcctgctcgttcagacgcggcgaacgaatcaggcaggcctcggagtgcatgagcggttcggcaaacacgcgcaggccggcgttgcgcagggtggtaccggtggagaccacgtctgcgatgaggtcggccacgcccagctgcacggaggattcgaccgcaccgtccagatggatggtctcggcctggatgccgtgctcgaccagatagtcatgtacgagcttatcgaacgtggtggccacgcgcttgccctgaatatcctccagagtggtgatcggggattcattcggtgcggcgaaacggaaggtcgaggtaccaaagccgagcggcatgtgctcgagcgcggcggtaccggagttcttgagcagatcctggccggtgatgccgacgtcgatggcgccgcggcccacgtatacggcgatatcgagcggacgcaggtagaacagctcgatgccattgtcgggatcttgcacgaccagctggcgagggttggtgcgcagacggtagccggcctcggccagcatgttccacgcgggttcggatagcatgcccttgttgggcactgcgattctcagcatttgcgttcctctcacaggtgcttgtagacgtcctcaagcgtcaggccgtgcttgatcatcatgacctggacgtggtagagcagctggctcatttcctcggcggtgcggtccgcaccctcgtattcggcggccatccaggtctcgccggcctcttcgatgatcttcttgccgatgaagtgggtgcccttgtcgagctcgtcgacggtcagggagccttcggggcgggtctgggccttttcggacagttcggcgaacagggattcaaacgtcttcatgtgattcagattcttttcttgcggttatggatgaaaggtggattgcggttcaggcttggagctcaggccttgaacgcggcctcggccttggcgcggatgtcgtcgatggcttgggcgggattctcggcgccgtacacggcggaaccggcaacgagcacgtcggcgccggcttcggccacgatgtgcgcggtcttggggctcacgccgccatcgacctggatgcgggtcttcaagccacggcgggtgatctcatcgcgcaggcggcggaccttggccatctggttgtcgaggaacttctggccgccgaagccgggctcaacggtcatgatgaggaccatgtcgaactcgtcgaggatatcgaagatcggctcgaccggttcggccggacgcacggcgaagcaggccttgcagcccatctcgcgcagctgtcgggccagacgcacgggggcgtgggtggcacccatgtggaaggagatggaggcggcgccgagcttggcgtattcgggagcccaacggtccgggtcctcgatcatgaggtgcacgtcgaccggcagatcggtgacctgacagatgcggccgacgatcggctcgcccagggtcaggttcggcacgaaatgatggtccatgacatcgacgtggaccaggtcggcgttggcgatggccttgagatcacgttcgaggttgcagaagtcagcggacaggatgctgggtgcgattgcgatattgctcatggtttcctaccttatctgtgcaatgggacttggggtcccgtgtttcgcgctgtttcggcgctgtttattgtggtgtcacttagtgcgcttggcctgcttcttctggcgaagctgttcctcttcgatgctctggcgttcgagctcgtcggcggtgaccgccgcaagcccgcgcgcctgcgccttggggtccggaccgtactggtagagcacgacgaacaggatgcagccgagcacgaagacgatgatcgcggtccacacgttggtcctcaggcccaggatcaccgtggagtagttgatgcgcacgttctcgatccaggtgcggcccaggccgtaccacatcaggtacatggcgaactgctggccggccttgagccggtcggcgagcttgtgtccgaggtagatgatgagcgcggcgccgatgaggttccagatcatctcgtagaggaacgtcgggtggaacagcgtggttctgtagtccgggcattgcgcgccggaatagcagatttcggatttgccgatggcgtccgcgtcgttgagcttcaggccccacggcaacgtggtgggccagccgtagagttcctggttgaaccagttgccgagtcggccgatggcctgggccacgggcagcgcgggggcgatggcatcggcgaagatcgcgaacggatagtgcttgtggcggcaccacaggaacgccaccaaggtgccgacggagatgccgccgaagatggccatgccgccttcccacaccttgaggatgttgaccaagttgccggtgggcgggaagtagtcggccggcgtggtgatgcagtggtagaggcgcgcgcccaccagcgcgcagggcacggtgacgagcgtggtgtcgagaatctggtcgaaggtgccgccgtaccgcttccaacgtgtggtgaggatccatacggccacgcagatgccgatcaggatgcagatcgcgtacatgtggatagtgaacgggccgatctcgaacttggagaaggtcggcgagggaatataagccagattcatcgtgcctctacttgctggtgctcatggtgtgtccacgcgcgggttgtgcttgatgctctgtgactaccctaccgtgtcacgacacaacccgcgtgaggcgcaccgggcgttcaccgggcgttgtggatgccttcggccagttcctcgctcttggcggcgagcagcttcaagccttccttcgggtcgcgtgcggtcttgttgtcgtccgcgagcagggtgtgcacgagcgcggagccgacgatgacgccgtccgcgtaggagccgaccttggcgccctgttcggcggtggacacgccgatgcccacgcacacgttctcggcaccggcctgacgggtgcgctccacgaggagttcgggcgaggcgtcgatggtggcgcgttcgccggtgacgcccatgcgggcggccgcatacacgaagccgcgcgcgttgcgggccacggtttcgaggcgctcggtggacgagtccggggagaccaggaagatgcggtcgagtccgtgacggtcggaggcttcgatccactcccccgcctcgtccgggatgaggtccggggtgatgaggccggcgccgccggcgttctcgaagtcgcgggcgaaacgctcgacgccgtagtggtacacgaggttccagtagctcatgatgagcggcacgccgccggcgttggccacggtttcgacggcctcgaacacgcgcttgatggtctcgccgttgttcagggcgatggaggcggcagcctggatgaccgggccgtccatgaccgggtcggagtacggcaggccgatctccacggcgtcgacgccgtgctcgaccatcgtcttgaaggcgtcaagcgagacgtccgggttggggaagccgtagggcaggtagccgatgaaggcaggcttgttctcggccttgaacttggtgaacatagcgaccgacttgctgagcttgtggctgatgcccagcggctggccggacggcgtggttgcttcattggtcataatcaaaaatctcctcttcttgttcaggcgacagtattgccgtgggcgccggccacatcgagcgcggcggcctgatcgtcggtcaggtagccgaaccacttgccggcggtggccatgtccttgtcgcctcggccggagatgttcacgatcatcacggccttgtcatagcccttggctttcagatcggcggcggccttgtacgcgccggccacggcgtgcgagctttcgatggcggggatgatgccctcggtctggctcaggtcgcggaaggcgttcatggcctcctcgtcggtggcccagctgtagttcacgcggccgatgtccttgagccatgcgtgctcggggcccacggaagcgtagtcgaggcctgcggagatcgagtaggtgtcgagcgtctggccttcgtcggtttccagcaggtagctcttggtgccctggaacatgccgagctggccggtgccgggggcgaagcggatggcgtgcttgccggattcggggccgttgccgccggcttcgtagccgtagaggttcacgcgctcgtcgtccaggaaggcgttcatcacgccgatggcgttggagccgccgcccacgcaggcgcagatcgcgtccggatggtcgatgccgtaccagtcctggagctgctgcttggcctcctcgccgatgatcttctggaagtcgcgcaccatggccgggaacgggtgtggacccgcgacggtgccgagcaggtagtgcgtgtccttgacgttggtgacccagtcgcgcagggcttcgttgatggcatccttcaggatcttgtcgccgagggtcacctcgaccacttcggcgccgagcatacgcatgcgggccacgttgagggcctgacggcgggcgtcgatctggcccatgtagatgcggcacttgaggccgagcatggcgcacacggtggcggtggccacgccgtgctggccggcgccggtctcggcgatcacgcgggtcttgcccatgcgcttgacgagcagggcctgtccgagcgcgttgttgatcttgtgcgcaccggtgtggttcaagtcctcgcgcttgaggaagatacgggcgtcgagaccggtcttctccttgaccagtgcggcgaagcgcggggcttcggtcagcgggctcgggcggcccacgtaacgctgctggagcgtcatgaattccttgtggaattcggggtcggccttggcttgcgtgtacacgcgctccagctcgtcgagggcggtgatgagggcctcgggcacatagcggccgccgaactgtccccagtacggtccctgatgttcgctgagcggggtggtttcggatgctttcacttgtgctcctgcctttactagtcgttccactgcaagttcatgatcatcagcggtggccacgccttcaccgaccagtaccgcatccgctcccgcgcgggcgtagtcttcgacctcgaccgcgccgaatacgccggattccgccaccttgatgacgtcatcgggcagatcggccgcgagttcgttgtatttgttcacgtccaccttgaggttcttcaggttgcgcgcattgatgccgatcaccttggcaccggccttgcgggcgcgttcgatctcctcgcgggtatgcgtctccaccagcacggtcatgttcaactcgtgcgccaggtcgagcaggtgcttgagctgggcgtcgtccaatgcggcgacgatgagcagcaccaggtcggcgccgtgggcgcgggcctcgaagatctggtagtcggtgacgatgaagtccttgcgcagcaccggaatgtgcacggcggcgcggaccttgtcgaaatcgtcaaggccgccgaggaatctgcggccttcggtgagcacggagatggcgcttgcgccgcccttctcgtactcgcgggccagcgcggccgggtccgggatgtcggagaggtggcccttggacggagacgcgcgcttgatctcggcgatcacggggatgccgtcggcgcgcttaagccatcgtgtcgcgtcaatcggagccggggccgccagcgcggccttcttcacgtcctcaagcgatacggtgagctcacgggcgcgctgatcctccagcgctcccgccaccagttcgtccaaaaccgacatggtcctccctttgttggtgttcggtcatgcgccactctaggtcacgtcctgtcccgattgccgaacccgtcctacattttgggctttcgcaggcgattccggcttaggcagaacattggcataaactggcacgcatgtgcagacgtttcgcgctcgacttggaatgggacgccgtggctggaccgcacaatcgacggcgcatccttgctcgccggcgtgcggaactcaggcactgcgttatcccgccgcttgcaatttcacgaggtcgccccgctgcagggcgacggcaaacgcctgattcagccgttggattcgaccgagcccatgcgcctgttttgacggaacatctttgacgagagatcgtcactgaatcaatgcttgctatatatgtatcacagtgtcataactatgaaattatattgtggaattgtggtacatgaagttcgcatgacaacgatgtcaccgttggtaggcggaccagtaggtgccgttgctgccggtggtggtgctgaactgccgatgtggttcagtccaccagaccgcgcagcagcgcgatttcgtcgcggtgcgtggtcggcgtctgctccttggtttcgagaatcatcgggagcttggccatggtcggatcgttgaccagtcgcgtgaagaacgggatgccgagctgaccctgcccgatgttggcgtgacgatccttatgcgagccgaggccaaactgcgaatcgttcacgtgaatcgccttgacctcggccaagccgatcgcctcatccaactggcgcatcacaccgtcgtagtcgtgcaccaaatcgtagccggcatccaacacatggcaggtgtcgaacgtgacgccgacgttcgccttgttctccacgccgttcatgatcgtggcgagctcctcgaagttgcgcccgcattccgtgcctttgccggccatggtctccagaagcaccatgacgccggtcgtacgctcgaacacctgattcagtccctcgctgatcagccggcagccggtctcggtgccttggcccacatgcgcgccgggatgaatattgatatacacctcctggccggcctcgcggatggcggtcagcagctcgatgtcctcggccaacgcctcgatcgcgaatgtgcgcttggcctcatccttgccggctagattgtagacgtacggcgcatggacgaccaacggcccatagccctcagccttcagacgcgcaccgaacgccgccgcgccggccgggtcgagcgccttcgaacgcttgccgtacggggaacgcgggaagaacgcgaacgcggtaccgccctcctcatgggaacgttccagcagcgcattccatccgccggccgtcgacagatgcgatccgatatacagttccatcattccaaactcctcgtgttccactcgctgttcgtgttaccgctatcatatggtaggcggcatcgagcgccgcccgcacaaccgacacgagacacaactgttcacccgaccaaaggagacccgagcatggcggcagccggcacacccaaggacgataccggccttgaacggaagatggagtcgcgtcacctgacgatgatctccctgggcggcgtgatcggcaccggcctgttcgtcagctccggctacgcgattcatcaggcgggaccgttgggcgcgatcctcgcttacgcggccggctccctgctcgtctactgcgtgatggtgtcgttgggcgagctgtccgtggccatgccgtacgccggcagcttccacatgtatgcgaagcggttcatcggccccggcaccgcgttcaccatcgccatcctgtattggctgaactgggcggtggcgctcgcctccgaattcacggccgcagggctgttgatgcagcgatggttcccgcattcgccgtcctgggtgtggtcggccgtgttcattgtggtggtgttcgcgctcaacatcatgtccgtgcggctgtacggcgaggcggaattctggttcgcgtcaatcaaggtgttcgccatcatcgcgttcattgtgatcggcctgctggcgatcttcggcgccataccgattgccggtcatgattccgcgccgttgctgggcaacttcgtggccggcggctggttcccgagcggcatcgcgccgattttctcgactttgctgaccgtggtgttcgcgttctccggcaccgaagtggtgggcgtggcggccggcgaaaccaaggatccctcgcgtgcgattcccaaggccgtgcacaccacggtgctgcgcctggcgattttcttcatcggctcgattctggtgatggcggccttgatcccctggcatcaggccggcgtggatacgagcccgttcgtgctggtgttccagtcaatcggtatgccgttcgccggcgacatcatgaacttcgtggtgttgacggccgtgctttccgccgcgaactccggcctgtacgtgtgttcgcgcatggtgtggtcgctggccaaggagcggctgattcccgaacgttttgctaggacgaatttccgtggtgtgccggtgtgggccgtgctgttcagcatggcgggctcactgctggcgttgctgtcttccgtgatcgccgcctcgaccgtgtatctggtgttggtcgccgtgtcaggtttggcgacgctggtggtgtggttctccgtatgcgtgtgccatatccgtttccggcgcgaatgggcgcgggatgggcacagcgccgatgagctcggctatcgtgcgcccggtttcccggtgctgccgtggctggccatcgtgatgtgcatcggcgcgctggtgctcgtggtgctcgatgatacgcagcgttcgaccctgtattgcatgatcccgttcgtcgcctgctgctacgcggcttattacgcactcgaacggcagcgcaaacgcgaaaacaacgcctaactcgatttcgaggggctgatttggcacttgccggagatctatctccgtttcaaggggctgatgcccgagtagacaaggctccacaatggcgtaatggcgttgccgcaaagccgtttatactcgcggtttggcgtttgagcagcccctcgaaagccaagtagatgtccccaccggacgaaatcagcccctcgaagccgagaaaccattgatggccgattatgttgtgcccagtgacgcgcctggttctatgctcgaactggtacaataattggagtttgttttttgcaaaggggcattgttatgcacaaggtgttggtgtcgttcgcagacagctaatgcgcgttgactcgtcgcgctaagccgtggtcgccgtttgggcccacggcacttctgttgtgccatttcccacgcacttggtcgaaggctggcgatgggccctgaccaaaaggaatttcctatccgcgatcatactcggtgcaattgtgaacatcgcctgcgtagccagtatcaccggcgcgcagatcatgttggccgcccgtggcgccaacgcggtcatgatcggactgctcggcacggcaatgggcgtgagtactttggtcggctcgctgttggccaacaagctagtcgatatggttcccacagggaaactgattgcgggcgcgctgacgttgttcgtggtcagccagatgccactgctattcctgcacagctacgcggccattctgatctgccagattctggccggcctgccgttccccgcgttgaacgctggcctgctgggctttctctacggcaagacacccgacaacatgcaggggcgggcttctgccgtatttgaaaccacggtcggcatactgggcgcagcatgcccggcgatggtcggctggctgttgcaacagccagatctcggtttcacggcggtgatggccgtagccgtggtctgttccgtagcgggattggccgtatcgttggccggcccgctgcgcagcattccgaatcccgaccagtggtcggaggttttcctgtaacgccaagcagcggagcgccggtttatatcaggtcgtacggcatctgacgcttgaccagccagaagatgccgaggccgatgaacaccagcagattgaatccgccactatgccaccacaccacggcgatcagcgtcgccatgcgcgccacatagaacgccacgcgaagccacccttcgcgcggccgggtctctatcgtcatgtgcgtgaagctgccgccgagcgtgcagccgccgcgcaaccatggcaccacgccctcgaagaggatgagcgccgccaggaagaggatcgagccggtccagtcgaacggttccatcgactgccatgagccgttggagcccgagggcaggtttgagcggacgatcatgacgaacagatgcgtcggcatcacggcgaacccgatcagcgtcatgtcgatgatgaacgtgatcagccgcctcatgaagccaggtgtggtggtcggcgtcatatcggcgacccgcgccggaatcaggcgcagcgaaagcatggccagcgcgaatccgatcagcgcgccggtcgtgttccacaggagatcgtccacgtcgaacagacggtaggcgcacgggaacacgcccatgaggccggtcagctgcatcgtctccagaaacagcgacgtggcgaatgacagtactgcggtaaccggcagcggccaacgccagatacggcccatgatgaagcccaacggcaggaagaacacgatattaaacgcgatttgcagtacagcggtgagaccatcggtacggatgtcaccgatgaactgcaatggattgagctgtggcgtcagatggtgcgcagcgcaataggctgccgcatcggccggcatcggatacagtgtgaagcacagcaggccgagcaggtacagcaccgtgccatacgccactatggccgacgacagtcggatgcgattgtcgcgatgatacagcaacgccagcaccggcaccgtcagcagcatggacacaaacggccacaatgccagcgcgaacgcaaacggttcggaaaagttcttgagaaatcccatcttcaatgctccctgcttcggtccgctccattcggtttcggaccatatctctcgacttctgattccaaggtacggaacatgacggcacgcgggtatcggccacgagagcgaaatcattgggatgaaaggcgattcgtatcattcgcatggatgagggaggtacaccagttgtgactgacaattgcggcctgcgaaccggcaggatgaatgggactgacccaactggcccgtctcatcttgtagggtgtttcgtgctcttgtaggcagatgattccaatggcgatgatcggaataccgccattgcaatgacctctcgccaaggccagctacctacaagatgctgaatctgcctacaagatgaattcgccggtgaaccatgccggcatcaccgtcgatgccgtggattgtttcgctgagcaatgcatcctgacaatcgtcgaatggctgcgtgggtaaatacttcttccttatgatgcacatatgatgtacgacttgccgttgcatgaatacgcgtatgcttcgctgccgattatgccgtggccatcgcctcgcataaagccgacaacgcccgtattgcatcgctaaaagaatagtcacgcggcatagccgtaccgctttctataagcgtcccacgggtctgatttcactctcattcatgctggcatcaccgcttcgaggtaaggacgcatcacgttcacgagccgaaattcgcgagcgtagttcatgagtttgaccaagtcagtgtgcgcggatctcatgtaattctggaaggcggattgcaaatcttgcggatccactgtgctgcgggagcggaacaaatcgcaaatggttcgttccaaatcataaacgcgaaccgtatgcccgaacatagtgatagccgacgccaggccaattgtaaagcgattgtcggccacctttctcactgttacgtcttcattcttgagacgagccgtacctgatgattgcggtaaggtaatcgtcggtgtcaggggggctcgccccctctccaagcaagaacaacgcagtttcatgcgaaaaaatggctttcggatatcgatactgcaattcgaacagcggatcggactccgcattcggtgaaacatataagccctttgccgctttctcaagcttggcttcacgcacgaatcgcgaaatctccgtgcgggaaactcctcgacgctccatttccgataccggaagatatcccatatgctccttcaatacgctttccgcttctgtcgctctagtggacatgggcattccttcagatgttgcggagctcggagagttgcctgaagaaaagttttgctatcgcctaacctaatgcgttattcgactccaaccgttgctcgacttcgaaatgctcgaatactatgagcgagttgtcgttcaacggaaagattgggttggcgaattcatcgcggtattccgccgaattccagaaagattcgtgtgcgctccgccattgggccgccgtgacgtcgccttcaccctcatcgatggcgtaccggtcagtgacttttccgagcggaatcacgtcaaccgcagtggtgacgagtacggctacgggtcgttcatcggaatccaccaacaccgaatgcgcgccaacgcacggcagcggttcgacctcttcctcatattcaatcatcagcgcagcggtggcggtttttacgccgtccagaatgagcttcaccaagcgatcgcgttcaggcccaggaaacataaactccgctttgggcaaatcactggtttcaaatgccgtattgacgctcatgcaatgctccagatcgtctttatgttcaattgtgctgtgcttttcttactcccatcataatagcccgaattccatgagtttccggcgctgatccagtggcctccattacggtcaatacaacctgatgccaagcaatcacatgacaacaagtgacactgtactcacgaaccggcctactatgggcggcatgacgattcgtattgttccgattgagccgccatggtttgaggaaaaggcccaagttcagtcgtgcacgtggcgcgaactcaatcaggggcatattccgcagggaatcgtggatgcgatcattcccgaattcgcgctcaaactgacgcgcagtcacgccaaagaccccaatcaggtcgtattggtcgctttggagaacaaccacgtgattggttttgctgagcttctgcaaacgccacgttcgccaatcaaacggtccgaggctgcggaactggcttcgctatatgtgctggaatcttgccatcgtcatggtgttggccgtgctttggttgaggcaggccaacgcgccatcggcaacgatcggctcgccttgtgggtcgccggattcaacaccaacgcccaaggtttctaccgtcacatcggcttccatgagaccggcctgactcaaaccgaagacatgggcccggaactcgaaatgatcaactactctgacggcgtattccagtgagcagcccgacctcccacacgcgtccggcgctaccatgaagccatgtctttgaacagtgagcaacgcgcggcgactatccgcgaatttcaggagaacatgagccggctgggtctgaccgccgaacggcggcaaggattttggcgtcagcggcagcagagtggagcaaatcatcaccctcaagtcgggcgtgctggagtatccgtggattatccgcgcctatctgctgagcagagctgagacacagggcgtggaactcacgccgttcatggcgttacgcggaaatccgcacgattattggttcctcgacggcgactctatcgaccgaggcgaaatcgattaaaaccgattgataatcggccatttacacgcaagaggcgccgtcaatcgcctcgcgcatagaggccatcgctctccatgcaggtggcgatgcgtgtgtagtattccgtcttgtcctcatggtcgatacgtgcgccgcaatgctgctgcaccgcaagacttgccggattggttttgtggacactcaggtaagcctcctcgatgccgagctcgcgggccttggcgagcgtgagcttgagcccggcggtcgcgtagccgtggccgcggtattcgcgggcgataccgtagccgatgtggcccggaccgttgcgcaggaagtcggtgagccggtgacgcaggttgaagatgcccacatagtcgccctcatcgttgacgagaatgtatttggtggctggcacccagccgtccggcaggccgacgccaagcgactcatcacgcaaccctcgcacgtatgcggcgaaccgttcacgattcatgccggccgctgggttctcgaatcccgtctcctccgccgggaatttcgcgaacaagtcaaacgcgcgttcctggtccgccagccatgtctcgatcagccgcattggtcacactcctcctgttgacacagcagaccacactactactgtgctcggccaacggccgcaagccttatctagggtgtgtttacagataggcagcaagtgtctgtcaatgcgtttatcgcaggatataccaggttactttccccgatacacggcagcgacgccgaagacaaattgtatgatgaacaatcccagcaggaagatcagagctcctggccggtacatgcggtagaagtcgaccatatccggctgcgccaaaggcgctgccatgatatacaccagcgcagcgaacacggcgccgagcgcggaaacaaccaagaacgcgcctacggcaaaacgcagcaggccacgatccgaggtcctccggcgcagaccacggcatccccacgaagacgaataccgagatcagcaggtagaacagcagcccgtacgtgggcagcatgtcgataatcagcagatcgttcatggcatatcctttcgtggcgcaatcccattcaacctgcgcatggccaaaagcgcaacatcgtgtcaagtaatcgcatgatagcaggttttgtccggctgcgaccgtggccacgatgagcggcatgggacatgatgacatgaccggggctgcggcgcggtcgatccgtatcgcccgtattggacaatgatccgttcgccctggatgcgatgtgcgcgatgatctcggccgtatccaaggacttccatgtcatgtggggcacgggttcgcccgcggtggcgatcgagcactgccataacccgcataccaggccggacgtgccggtgtcggatcctaaggaatctgttggtgtcgctgcagctcattgccattcccactgaagagatgattggcgaaaacgatactcactacctattcattaggcttcagctcgtgttcgagcacaagtttcatcttgctgttatccatcaaccatgcgtgtaggtctcggtccaggatcatcgccagagcgaagcacgcctgcgtcgcattctccaatgcaatccgtcgattctcacccggcagaggtatgccgttgacaagcggctcatggtgagcgacccgattacgcagggcatgcactgtttttacgatatccagcgcgtactttctcgtccagcgttcttccactgcacgggcatactggcgcccattggagaatgtcttatcgagtcctttgcgccataaatcgttctcataatctgcacggcgctggtctggccacttcgtgtggattgttccgccgtcttccaagagattgcgccaaaatccgaatgtcaatgacgctatgagatggccatgcgtatgattttttcgctggtgcggggtgagatggttccacgcttcacgaatctggtactgggttcggtcatcgaattgtagccctgccatataccagtcttcagtgccattctgctccagagcgaggagggagagttgccggtccatgcggttgcgcagagcgacctcgaggatggcgatgtcgcccatacaggcgctggccatgtcgtgatcccacaggtacagctctagcgctgggcatgaacgtctttgagcctcataattgtaggtggcaagccgttcatcggtaatgcacgcgcgcagcgccttctcccgcggacttcctttccttggagtccgtgagaggaaatcagttgttgaatttgactgtcggctcatggctcattatgatatatcaagaattcccccaaagggcctctccggacggtcttcgactcagccgtgatgcactgggggtttcttttttatctggataatcggggcttggttggtctgggctcttcttcaggacaatcgcatatgtttcgggagtgctcagctttcagacgaggcattcgaagaaatgccattccgaggaatcggcatcatggatgatgatcagcgtgccgccctcgttggttatctccttatgaggccggtcgtagagcgcatcgagctgtgttcccaggttcaatcgcagggtcgcatccgcttccttgattatgcggatgttctcctggggcagttggccactggagtaatccctgccgtccagaatggtgccgtcgacttgttctgggtcagcggcgaccttcacgtaccggtatccgtccccatgaaagctttcctcgtccttgctgacgattgcccgcgcatcctcggaaaatgagatcgagaacgtctgcgacagattcgaaaccggactatagccctagtatcgagtccatccgaaccatactcccgccactaccaacgccgcgatgcccaaagcgatgatcgttccggcccggccaccggcggaaggttcacctttccatacgcggtttcccatcgtcggcctcctagccttagccgtagggtctgctagatcaaagtgtgtattactgattagcgtgaggtcgccgccactacgtgagcggtcgaaaacctcatgccacccggcaaatccgagaagcggtcggagaactattcgaagccgtcagctaatccagtgttgaacgtacgcgacgacacccagaaacgctcctatacccgctccgaggaagacgaatccccatcccaaccagtcagcaaatcgattgaccggggatttcgcaaagccctccatcaccgaattcgttccagtcgagcccttccctgattcatggttgtcctcctcggcatccctacataaaacccgttagtccaattcaactatatctgtttttcgccagctacaggagagaatcgactataactgatttccatgcgcttcttcagagaagacaagtctgttggacactttgatggactaaaggccagaacacaatggcgctagatgggacaaaaggtacattggtcctatggctaagcgcaaacatatcggcaccgtaattctcacgatactggtcgcggctctgctggcgtcgggcgtttccggctggctgttctggcagtcggtacaacgggtgatcggcgaggcgcagcaggcgggcgaatatgcggctgaagcacagcaatccgtcgggcagggcgacttcaagcaggcgcttgagcagatggacagcgctggcagtcacatcgtcgcggcgcgagacgaaacccagggcatgctatggcaggccgccgaatacgtgctgtattacggttcggacgtgaaggcggtgcgcggcatgctggatgcggccgccgacgctgcgaccaacgccctgcccaaaatcgacagtgccgcgcagggcacgttggtggacttcaatatcgaagagctgctgtccggcatgaacttctccgacggcacgctttccattcccaaaatcgcttccatcaagcaggacctgtccgacgccggtgcggtcttgaagcgcgtcaagacgtcgattcatgcgctgccgcaaccccgcacggaacagatcaccgaaatggtcaaccagggcaagcaggtagtggaccaaatcgatgagactttcgacaccttgaacaccatcgtcgaaaagattccgggctgacgttggttcgttcttgtcgtatattggcgtaacctccgcataaggctagtccatacaaatttatgtttaaatttgggataggaggtgccaatatgccgacacgcacaccaatcccggtcagtcgggcgatgcgtcagatatccgccaacctcgatttggcgcgcagacaacagcgcattcccgtagccttgctggccgagcgggctggattatccatgccaacggtcaccaaaatgctgcgtacgggtaatggcagctttgagaacttcctccgcattgctcgtctgcttggactgctggacggcgtacagcaagcgacggaccctcttaacacagatatcggcaaattacgcgccgacgaagacactccaaaacgtattcgatagtacagcaggaggcgcaacacatcatggaagcaatcgtcaccctgcagttcaacggcacagacgtcaccgtcgggaaattattcaccagtatcaggcgcggcatcgaatcggcacatttcacatacgatacggcctatatgcgctcttcaaacgcagtatccctctgtccagagatgcccctctccccccggaacgttcccggccgagcataatgcgatgcatcgcatctttcaagactgcatgccggatcgttggggcaggaacctcatgcttcgtgcagaacatcaagatgctcgttcggagcatcgcacagcacgcacactatttgagggagatctcttgctatccgtcaacgatgagacccgacaaggcgcattgcgcttctggaacaacgacggtgacgcgctagctcccagtgagaccggcggtccaagagaagtgaccattcagtcccgcatccatagcaatgatgagcagctgctttgaatccggcattgcgcggcttcgcgaagcaaacgcacaatgacttcacattcccgccttgcaccagctggctgcaatctgcgtatggtcatgtatctgtaggccggcacgaatgcggctgatgggtgcggcgaatcgtgacattgcttattacccattcgccccttcagtcgtaccattcgggtcgtcgcagttccaggaatggccgctgtttgcgcgctgctgcggtctgtgtgagatcgatgtcggcgataatcaactgttcttggtcgtcggccttgctgacgacgttgccgtacgggtccaccaccaccgattggccggcgaacgtcacatcgccttccttgccgacccggttgcacatgacgatggccacctggttctgcatggcctggacacggattttccacaggaacggcttcgacggttcggcgtcagtgttcggaaccgatgctcgccgtcggcacgatgaccaggcggcgccgcgcaacgcgcatgtgcggatgccttcacggggttcactcaaatagcgtcatccagtcgggatcgcggtgggccgcaaaacacatggcgatttgttccgcggtgtttcttgtttccgaaagccgcggcaaccggtcttcctcgaagtagcggatttccgtcgtttcgatgttggccgagaaccaaccgccggcgcggctgcacaatacgaagaacttgagcaccccgtacggataggtcagcgcgttgtgattggcgcagtcctgcaccgcgatgagtcgctcgcccctcacatcgagcccagtctcctccttgacctccttgacggcgttggaccgaatggactggttctcgtcgacccagcctccgggcagtgaccattccccgctgttctcatgcgtcatgaggatcctgccttcttcatcgaagatggccgcacgagtgtcgagtttcggcgtcggatatccggcgctgagcagtcgactcacctgtccggccggcgcatcaacctgcgtggagagcatgtcgaccgccatcgcgcggatacgctcgtagcgctcccggtcgaaggggtccttgcagtacatcagtccggtctgggccagcgcctgcaattctcgggcctgttccagtaatgtgcggttcgtggccatcatcgttcatcctgtcatcgtaaggtcttggatccgtttgcgctcaggcatcgcagcgtagtgcaagcagtatagcacttcgaaccgttccggggacgagggtctcagtgcatcccccgtaacctctcccatgtgccatcaacgcttggcgagctgcacgttcttgcgctgtctgcgattgcggctggcgaccgacttttcacgctcgcggcgcacgtgggcctcctcacgcgcggccgccgcgcgctcttcttccaaagacggcaatccggaggcggcgcggtgccggttctcccgctcatggtcgcgttcggccttgcgctccccgcctcggatccgggcgccggaaaccatcgcagttggcagagcgtctggccgaagttccacaggttattggtcagccagtacagcagcacgccgaacggcaaggtgccgcccgacaccacgtagatggccgggaacacaaacgcggtcagcttctgcgtgcggaactgcggtgaatccatggcgtccttcggcgtattgcgatggatgagcagccactgcatcgcgaacaacatcagacacatcaacgccacggccacgccgatgacgacgtgcgactgcggcgagacgaccgtgccgaacgagtcggcgatgcgcacgccgaatatggacgatgattcgatgtcgcccgccatgacgcggtcgatgccgctcaacggttccgcattcccggcggcgcttgcgggcagggattgcagcgtgtagaacagcgagcacagaatcggcgcctgaatcagcgaagcaggtatgaaccgagcggattggcgttatgccgctgctgcaaagccataatttcacgttgcatggcttctttggaacgcggatccttacgcgcggcgtacttgcgttggatacgttggatttgcggttggagcacctgcatacgctgcgtcgcgcgcatttgggagaagaagagaggcaatagacagatacggatgatgagcacgaggcacataatcgcgatgcctaagctgtgcggcaccgactccttctacggcggcggcatggtcaccggccagcccatcggcaccatgatcggctctcgcatgatcaacaatgcgcaagccggcttcatcatcggcgccgtgatcatgggcttccggattcgtggcgcttgacatctgacctcgcgaggaatcctcaaaggacatggaacgcaccaagatgacgctcaaggatctcgctgtctccttccacttcccgaagttctccacctcgcgtgacttctacaaggcgttcggctgccgagtgtgcatgttgctcagctaccagatgatctccgtgtaccaactctacatcgtcgaggattacgtgcaccagaccaagaccgaggctgccggcaccatcgccaccatgtccatcatcaccatggtcgtttccctgaccgcttcgctgatctccggcccgatctccgacaagatgcacacgcacaaggtaccagtcatcatcgcctcgctgctgttcgcgattggcaccgcgatgccgtggatcatgccgagcgtcacgggcatgtacctgtatgcgggcatcgccggcttcggctacggcgtgtactcagccatcgaccaagcgctcaacgtcgacgtgctgccgaacaaggaagaggccggtaagggcctcggcatcctcaacctggccaccacgctcggccaagcagtcggtcccaccatcacctccgtggtcaagaccacgaccggcacctacacgccggcgttcgccatctccatcgtcatggccgtgtgcgctgccgtgttcgtgctgcgtatccagaaggtgaagtagccgctgcgagtgcctatctccgtttcaaggggctgattttgactttgcggaacatctacttccgtttcaaggggctgatgccaaagtagccactggttaaaaacggcggaatagcgatagaacaatgccatttctatctgcgttccgccagttgaccagccccttgaaacggaagtagacctccggcaaacgccaaatcagccccttgaagctgattttgactcagcatcatgcagcgcagctatatcctcggtgcgggtatactattccgggccgtcacgacgacgcctatggaacgcacgcatggcaaagagagaaacatgagtcagcccgacaccgacacggcggcacagtcgccgtcctcgcaacaggaaccgcagattcagacggatggccgtcgaagccattcggaacagatgaatcaaccagcgcaaaccagccagtccgagtcgtcacatgatggcaaagacgagcacgccctacataccaacctgaagcgcggcatggaatcccgccacctgcagatgatctcattaggcggcgtgatcggcaccggcctgttcctgagctccggatacaccatccagcaggcgggccccatcggcacgatcctggcatacagcatcggcgcgctgatcgtctacctggtcatgctcacgctcggcgaactgtccgtggccatgccggtgaccggctccttccacgtgtatgccgaaaagttcatcggccccggcaccggcttcgtgatcgcaatccagtattggctcacctggacggtggcgctcggctccgaattcaccgccgccggcctgctcatgcaacgctggttcccggacagccccacatgggtgtggagcgcggcgtgcatcattctcatcttcaccttaaacgccttgtcggtgcggctcttcgccgaagcggaattctggttcgcctcgatcaaggtgttcgctatctgcgcgttcatcgtcatcggcctgctcgccatattcggcgttattccgattgccggctaccagcatgctccgatgttcggcaacctcgttaaggacggcatcttccccaacggcttcatgccggtgttcgccacgattctgaccgtcaacttcgcgttctccggcaccgagctcatcggcgtgaccgccggcgagacgcgcgacccggaaaccaccgtgccgaaggccatccacaccacgctgtggcgcctggtgctgttcttcatcggctcgatcaccgtgatgtgcgcgctgatcccgtggcgcaaggccggcgtgggcgaaagcccgttcgtgctcgtcttcaacagcatcggcatcccctatgcgggcgacatcatgaatttcgtggtgctcacggccgtgctctccgcctcgaattccggcctgtacgcctccacgcgcatggtgtggtcgatgggcaacgaaggcatgattccgcgctggttcgccaaaacgaaccgtcgcggcgtgccgatgctcgccttgtgcgccgcgatggccggtggcctgctggcgctcctgtcttccgtgatcgccgcctcgactgtgtacctggtgctggtggcgctttccggcctgtccgccgtggtggtgtggatcgccatcgcctactgccagatcgtgttccgtcgccgttggctggagtccggccattccaccagcgaactcaaataccgcacgcccggctatccgtacgtgtcttgggcggcgttcatcctgtgcaccgcatcgttcgtattggtgattttcgacgtggagcaacggttcgcgctcgtggccgagctcgtgttcatcgtggcctgctatggggcgtatttcctgcaacagtgggtacgcaagcgcaaaaaggcgaccgaggccgacgacctcgatacgctttgggtcgcgcgcgactgaacacatgaccatagtgtgatacacgtcacttcctgaagtacgtagtcgttatggaatcacccgcacgtttcccgtatcggagctgtacgatagctgtgagacaggggggtcgtcagatttcggggggagggttccggtaacggtccggctgcaggatgcaccggaccgtgcggcacgtatcaactcgtggattcacgccaaactcagttcagtatgccgattctcgtaaatggccagaagcggaacaacgccacaccttggatatcgtcgtatggcactagcccattgttgccgtcgtcaagatggtatcgagaatctctggaattggagcgattatcaccaagcacgaacacgttgccgtcagtaacggttacggaaaaagggctgtcgcttggattcacgccggacttaagataagcgctttcatcaatgggtttgccgttgaccgtgatgggctccccggatcccttgcaggcgacggtatcgccgggcagaccgatgacacgtttgattaggtaacgattgctgtcgattatcgacatcagattggtgggaagctgctccccctccatccagtctgcgggatctttgaacacgatgatgtcgccacggtgcagtgtaaagagtctcggagtcaatcgcgaggcaaatacgcggtcgccgatttgcaacgtgtcttccatgctgcgggatggaatcacatatacgttgaacacgaaggtacgtcccagcaacacgaccagcatcaccgcgatcactgtcagcagatagccgcgaatttcgctccaaacggagggctttcgcgcatatctcctcgactggccacgcgcttttttgctatgacgccccaccatcacatcctttccgaccgataacgcaacaccatagtcctcaaaccatgccgttacctacgcatgtttgagctcagctgtcacaccagcggttcgcgcacgtccagttcacaggcgatgccggtttccttgcgggcccattcggccgcctgcagtgcggcgatgttccataatgcgcacggcactccgccaaggtccggatgcgatgcccagaatgtgaggtcatcagcgtatgcggtgatgaccgattcttccgtgactggcataatcgtgtggtacaggcggtccgcaagcgtggccacgaattcgttggccgcggcgaacgtgtcgatgagatgctgttcggcggtcaccggcgggccgaccagctcccaggattcgacatccgtggcgctccaatgcgcggcttcgccgtccacttcacgctgcaaagagacgaacagcctggcgaactcatccgaagtcagtcccgtaacccggcgtcgggttgacaattcaatcggagtcatcagataccgttcctttcgcttcgttcattccgttgtttcgctgcttggatttgctgccagccggcacaaagcccatctcgcacacctcacgatagcccaaactaccggcatggccatgattgccagccctacgaccagtagccatgaggagccggcgtaatggcctcatcgagcattgtcggatgattcgcgtggcccacaatcgagacagtatcggtttccgttcggttcatgcggccagactatcgcccgttcttgccgattgcctgtgagcaggttcggatagactggcgcgagaacaatgcgagaaagaggtaaggatgacccggaaacagtcgcaacagcacgacgcacaacgcaaaccgtcctggcgcgtacgctggaaaaccatgagccgagccgtgggcatggaaatccgcgaacacaaaagctcattcgcggtctatgtggtgctgcgcatgctggtgctcgccatggcaatactccagttctttaacggcgactacgaaaatgtgttcctgtgcatcctgacgttgctgctgctgttggcgccggcgttcatccaggtgcagttccgcatcgagctgccttcggtgctggaagtcatcgtgctggtgttcgtgttctcggctgagattcttggcgagatcagttcgttctatgagatcttcccgttctgggacacggtgttgcatacgatgaacggcttcctcgctgcggcgatcggcttctcgctggtcgacctgctcaaccggtccgaccgggtgaagttcgagctttcgcccctgtatctggcgatcgtgtccttctgcttcttcatgaccatcggcgtgatctgggagttcttcgaattcggcatggaccagttgttcgggttcgacatgcagaaggacgccatcgtgcattccatcagctcggtgatgctcgaccccacgcacaccaaccatgcgattcgcatcaacgacattacccaggtcacggtcaatggccaagacctgggcctcggcggctacctcgacatcggtctgatcgacacgatggaggatctggtcgtcaacttcatcggcgcggtcgtgttctccgtgttcggtttcctgtacgtgaagaaccgcggcaagaaggactccatcatcagtcgtttcgtgccacgccgcaagtccgccgaccgcgattacctgcgactggtgattgatggcgggagccgggaaagtcatacaaatatgagagatacagtaatcgaacaaacgttcgactgccctgataaactggatgcataatttagcgacgacaacgacatgatttacagacgcccgaaaaaagaaaggcgatctcatgactggcgaggaactgaagcggcagattgctttgtatgagagcgcggaccacaccgtgcacctcgatgtgaaggtagacgaggacacggtgtggcttaacagacagcaattggccttgctgtttggccgcgatatcaaaacaatcggcaagcatgtcggcaatgcattaagggaagagctcaatggattttcagttgtcgcaaaatttgcgacaactgcatctgacggtaagacataccaagtcgagcattacaacctggatatgatcctgtcggtcggataccgcgtcaaatccaaggaaggcatctatttccggcgatgggccaactcagttctgaagcagcatctcgttgatggttataccatcaatcgcaagcggcttgacgcacttcacgccgtcgtcaaggtgctatcgaggtccaccgaaccggaaattgctggcaccgccgagatcttggaacgatatttgccgagtcctgtgctgcttaacgactatgacacaggcaatgtccctatacccaagggagacgagtcccagtgggtcttgacctatgaggacgcgatgctgttcatccggtcgatgccgtatatgccaatcactgttgtgtttgcgaactccttcgctcatggtgccgaaaatgcatacatttggttattcgctgtttgcggtggggcgtgcatgggttagtgtttcgggttcgattccctgtcagaaaaaataatcgagtgcgggattacggccggtaaggctcctgtcgtggatgcggatgcgcgccggtcttacggtggtgctttcccgaaacgtggattgcacgaggtgtgggacggcacgcggattcggccgttttccgcccgccgtcccacagcgctcgctatgaacggttgtggataatcatggagctgtagcggaaatcggcgttattccgcggtttcgacagttaatagaacaaatagaacagccagcttaggcacggcgcggcaaatggcgcaaaccggccgcgatagtagtagcgtggtgcataccagtacaaccatgcgaggagaacagccatgatcaatgaggaatacaaggccatgcttggcggcaagtccgtgattcgcgagctgagcgagtacgccacgagccgcggtgccgaaatcggctaccagaacgtgttcgattacagccttggcaatccctcggtgccggctccgaaatccttcaccgacgccatggtcgacctctacgaaaacggcgatccggtggccatccacggctactctccctcgctcggtatcccatccgtcaaggacgcgatcgccgaaaacctcaacgaacgtttcggcatggcatacaccggcaaccacatcttcccgaccacgggcgcggcgggcgcgctgtcccacgcgatgcgtgcggtgaccaagccgggcgatgagatcatcaccttcgccccctacttccccgaataccagccgtacgtcaagggcgccggcgccaagctgaccatcgtgccggccgacaccgagaacttccaaatcaacttcgacgcattcgaggctgcacttaacccgaacgtgcaggtcgtgcttatcaacaccccgaacaacccgtccggcgcggtgtattcagcggacacgctcaagcgtctggccgcgatcctgaccgccaagcaggtcgaatacggccacgatatcttcctgatcagcgacgaaccgtaccgcgaaatcgtgttcgacggcgccacccagccctacccggccagcttctacgcgaactcgctgacctgctactcgtggtcgaagtcgctgagcctgcctggcgaacgcatcggctatgtcgcggtgaatcccacagccaccgacgccgacctgctcgtgcccatgatgggccagatctcgcgcggcaccggccacaactgcccgccgagctcgattcagctgggcgtggccaaggtcatcgaccagaccgccgatctcaacgtctacgagacgaacatgaacctgctctacgatgcgctgaccggcatcggcttcgacgtggtacgccccggcggcacgttctacatcttccccaaggcgctggaggacgacgccgtggcgttctgcatgaaggccaaggaatacgacctgattcttgtgccgtccgacagcttcggcgtgcccggatacttccgcatggcctactgcatcgacacggagaaggtcaagcgctcgatccccgtgttcgaaaagttcgcccacgaggtgtacggcctgtaaacacggaccgcaagtaacaaacacaagaaaggggttgccatggaatacaccgaagacgccgatcgtcgcgaactgctgctgcacagcgcctatgactccgatacggtccgggccatggagcgacccctgctggacaaaggcgtgccgctgatgcgcatggccgcccaggccgcggcccacatggcggccggtatgctggacgacgaggatctggcgctggaggacacgtcgatcgtgctgctggccggggccggagacaatggtggcgatggtctgttcgcggccgccgcgctggcccaggagggcgcgaacgtcaccgccatcgccgtgggccggtcgttgcatgaggccggattcgcctcattcgtgcgcgccggaggcaaggtgctggtgcttgatcccgcggctgatattcccggttgcgcgtccgggttttccgccggtgaggccggcgagcgattgcagaccgccatcgccgtggccaggaaatcgcatctgatcatcgacgcgatgaccggcatcggcatccaaggctcgctacgcggcatccccgccgcactcgcctccgcccttggtctcgacggcgaggctcccgatgagcccgccctgccaaaccgtgagtcgtcaggcgattttccgctggtacttgccgtggatacgccatccggcgtcggtgtgaacgatggttctctgcccggcccgtacattccggccacggtcacggtcacgttcggcgcgatgaagccgtgcgcggtgctgccgcccgccacgttcgcctgcggccgtatcgagttgctcgatttcggattcgatatcgacgacaaggatccggacgtcgaggtggtggataattcgttcgcgtccgacgcggtccgtctccccaggttcgaggattccaaatactcccggggcgtggttggtctggtgaccggctcgcagcgctaccccggtgccgccgtgctcaccgccagcgccgccgcccgcgcgaacaccggcatggtccggtatctgggcccggagcgcgcgcagaacatggtgctcgccgcactgccggaagccgtgatcggcaagggacatgtgcagtcctgggtcgtggggtccggcgtgcccgaggctagcgtcgagggcaccgacggcgatatgcagcgggacaccatcgccgcattgctcaagcattacgcgctcggcagcgaggatgagaacaaggacgcctacgacatgccgccaatcgtggtggatgccggcgcactcgacctgctgccggagcgtgtgcccggccaggtggtgatcacgccacatgccggcgagatggcgaaactgctcaaccggttcgaaaccgccgccagcaccgcggagcatgccgattcgcacgagccgtacaccgccgacgacgtgcggttgaacccgttggccagcgcgaagcgtgcccacgagctcaccggcgccaccgtattgttgaagggcgcggtgaccatcgtggtggatgaggaccacgtctatgcgtcgggtagcgcaccggcctggctgggcaccgccggcgcgggcgacgtgctggccggtctgaccggcgccctgctcgcccagcaggatgacgtggccaccacgggcgagaccgtggcctcggccgcctacctgcatggcctggcggcggcgatcgcctccgaatccgagcaacaaggctggcaggagccggaactgatcggccgcgagcatcgccagcgcttcatgacgctcggccacccgattgtggccggcgacgtggcccacgccatccccgaagccatcgccgacgtcatcgcatgattccgtacgttggctcccctcagagaggggagccaacgtatgaaaccccctatactaaatcgcagaccccactcaacggccccaacaacacaaggagcatcatggccaactcccccatcaccgacgtgattttcgacttctgcggcgtgctgctggactggaacacccgcgcatgcctggaaggccgattccccgatgagatcgtggaacgcatctgcgccgacgacgacccctgcggcttcttccgctacgaggaccgcatggacaccggcgaggatttcgcggacatctacccggatgtggtacgcgaacaaggccaggaactcgccgacatcttcaagttctacatcggccactacgcggacgcgctgccccgcacgcttccgggcatggtcgagctgctggcggatttgaaggcccacggctacggcgtatggggtctgaccaactggtcgcatgagaccttccacctggccttcgagaagtacccgcgccttgaacagctgttgcagggcaccgtggtctccggcgtggagaagatgcataagccgaacgccgacatctacgagctggccctgacccgtttcggcctcacggccgagcgctgcgtgttcttcgacgacaccgccaagaacatcgtcggcgccaacgaggtcggcatccacggcatcctcttcgagaacgcgttgcaggcacgcgaatcgctcgcagaactcggcgtacgtctgtaagtcgccaaacgttgcatcgcggcagttgaagtctatggacccgtccttgacgacggtgaccggccgtgtggcgactatccctagcgatataaatagactttatgacactgctgcagctgaaatacatcgtcaaaatcgtcgagtgcggctcgatgaacgaggcctcccatgccctgtacgtctcccagccggccctgagctcgtcggtcaaggaattggagaacgagctgggcatcgagatcttcacccgctcctcgcagggcatcgccctgaccgtggacggcgcggaattcctgacctacgcccgccaagtgctcgaccaggccgacctgctcgaagagcgctataagcatgccaaaccgcgcaagcagctgtgccaggtctccacccagcactacatgttcgccgtcgaggcgttcgtggagatgatcaactccatcaagtccgacgaatacgagttcaccatccgcgagacccgcacgcgcgacatcatcaaccaggtcgccaacatgcagtccgaaatcggcatcatctacctgtccgattttaacaaggacgtgatcggcaagctcctgcgcgagaagcacctcgaattccacccgctcttccgcgcgccgctgcacgtgttcatctcgcgcaacaacccgctggccgccaagaaggtcatcaccatggaggacctgaaaccttatccgttcatccagtacgagcagggcgaggaaggctcgttctacttctatgaggaagcggtctggccggagtactcccccaagcagatcaacgtgaccgaccgcgccacgatcctgaacttcatcatcggcctcaacggctacacggtgtgcaccggcatcgacaacggcgacctcaacaacgagaagatcgtcaccgtgccgctcgacaccgacgaaacgatgttggtcggctggatcacgaacgagcgttccaagctctccaaggccgccgaaacctatctcgacaagctcaagtccgtagtctccgaccacggctacaagctcattgattaggagtaagtaaaacaggcatggtcagcagtgagatatactgcgattaagccaaccccgctggggaaatggaagtaagggccggctcctgagtatctcaggggccggcttttgcgctattgagactgactggcaaaaccagtttgatggcctccgactacttggccaagattaccgacgcggcggctgtcgcggcgaagcctttgagcacttcaatcatcacgtcgcgatcttcgacatcaatgttgcgggccgcggcgagcataatcggcagtgactgtgtcaaatgcgaagtgaggtcgccgaatgtgtcgtatccgccagcctcgaagatggcaaacaggttttcgatgaacttgcggcgatgctcgtcgtcgtattttgccatccatccgttgatcgtgcgtgccaggtattgcgcgctacttgtcagtccatcagcctgtacgaattggccatgatcgacttgccagtgcaatgcgaaatgctgcatgatgctggcaccgtcgctgctgaccaccgtatagccgtcttccacatgctcacgagtctcaaacagcatgccgatgatcgacgagcccggtaccgatttatggatcttcgacgcaatgcgtacgtacccgtcctcatcgaagaacacctcatcgaatccaggcccatcgtgcgaatatacgaccgtgatacgttcctgaatctcgctaggcacattggccgccgcatacaccgccagattgccgcctttggaatggccgccgaccataatcggcccggcccaatggccagccagctcggtcagataacgcgcggcggcctcctgcgaggcgaccgggcggcggaacgccatcatgaagtcctctttccacccgacgattgagctgtcggtaccgcgaaaagccacatagagcgtgccgttacccagttcgaacacgcaggccgagaactgcttggtggttgcagcatcgaattcgtccacgtatgcgcccacgcgtaggttcctccaacgtgggctctcgctcatcgcacgtaacagatcgacattcatcgaaggcgaccacaccttgccgaacatgtcgtcatagcattcggcacgcagcaaatcgtgaatcggaaccgtggcgatcatgccgtcggcggtctctgcattctcgtgatagcgcggcacgttatccggcatgcgagcataggccaactgggacaaagcgaggctatccgcctcggtgaacggcagttcggcgaaagtgtcgaaatgttgccgaatatcgtcggtgatgttccccatagcggccttccttgttcgaatgcaacgaacctacggtaattctacgccgagcgggttttcatcacaggcgagtcggtcccagagtttagaaccctatctcgctttcaagggagctgatttggccttctggagacatttatctccgtttcaagaggctgttcatccgtcatatcccgagtatgagcggcgtcaccccaacgtcattccgccattttcatgctgcttctacttgggcatcagcatctcggcggtcttcttcattaccttgcgacaacttgttcgctttgctgtccagatgatgctcgatgccgaagtaactgcatatccccacgagcgcaaacagccctatatcaactaaccagttcatagcacgctccttgccaaagcttttgccttaatatggtgctgctgttcatggaacgtaataaaaaaagcgggctcgcaagcccgcttttggtttttagattgaagacgatcaggcgccgtattcctcaaggtaggcggcggcgcgctgctggatgtcgtggctgagcagcggggcgccgtcggggttcttcatcttggcggcggcgtcgaagatctcgcgcacgttggcgatggagagcaccgggaagccgaattcggcttccacggccttcacggcggacatgtcggagtccttggtcttctccatgcggtccacggagagcacgagacccacgacctcgacgttcgcctcggccttgagtttggggatgacttcgcgcacggcggtgccggcggtcatcacgtcgtccacgagcagcaccttcatgccgtcggtcagcggggtgccaaccatccagccgccgtcgccgtggtccttcttctccttgcggtcgaaggtgtatccgacggtcatgttgtggccggcggtcagcgcgatcgcggtggacacggccagcggaatgcccttgtaggcggggccgaacacggtgtcgatgttgcggggaatcgtgttgtgcacgatggcctggctaatcttttcggcgtagaacgcgccgagcgcggcgatcttcttgccgtcgtcgaaggcgccggcgttgatgaagtacgggctcttgcggccggacttcagcgtgaagtcgccgaacttcagcgcgttggattccaacaggaattcagtgaagcgatgtgcgagtgtttctgccatgatgttccttacctccaagtctgtcctgcggccagtttagcagcgagttcgggacggctgtccagcaggtcgtcgagttcgcgggcgacgcgcagcggggccaccgggtcgaagagcgcggccgcacccacttcgacggcgttcgcgccggcgtacaggtattcgagcgccttctcgccgctgtcgatgccgccgaggccgatgatcggaatctccggcagtgcggtgcgcacccgatagacggctgccaggccgaccggcagcacggccgggccggatacgccgccggtgacgttggcgatgatcggcttgccggtgcgaatgttaatgcgcatgcctttgagcgtgttgatcatgctcaacgcgtcggcgccatgttccacggccgcgcgcgccggcacggtgatgtcggtgacgttcggcgtgagtttgacgatcatcggcttgtcggtcatcgggcgcagccggtccataagattggcgagggccaccgggtcggtgcccacgctcatgccgccggcggaaacgttcgggcagctgacgttgatttccagcatgtccgcgtcggagtcggcgagcttttccacgaccgccgcgtaatcgtcatcgcaatgtccggcgacattggagatgacgaacgcgcccgcggccttgagcttgggcaggtcctcggccaagtaatggtcgatgccgggattctgcaggcccacggcgttgatgttcgcggccggcgattcggcggtgcgcggcgagggattgccttcccacggtacgggcgaggcgcccttggtgcatacggcgccgagctggctgacgtcgtagaaccagcggacggcggcgtactggaaggtgccggaggcggtgccgaccggattcttccattccagaccggccaccttggtgtggtgcttccacacgtggggctcgtacaggttgatgtggttgtcgccgccctgcgcggactggttgtttgcgctcatcgtcacttcccccatccgagctgttcgcgggtgaacacgggtccgtcggagcagaccttgaggcggccgtccacggtgtcgatggtgcacagcacgcaggtgccatagccgcagcccatgcgctgttccatgctcagctgcgcggggatgccgcgttcggcggcccagtcggccacggccttcatcataggcagcggtccgcaggacagaatgatcggcttgcgatcgtaggccttcaggtcgtcgccttgttccagtttgttgagcaggtcgaccacgttgccttcggcgtcgtcgatgctccacgaccagtccgcgtaccgggagacgtattcctcggcgaagtggtcgttgcggtaaccgaatacggcggtggcaaaggaggcgtcgtgttcggcgagcttttgcgcggcgtagattagcgggggcacgccgagtccgccgccgacaagaatgtagttggcgtcttccttgaggttgaagccgcggccgagcgggccgagcacgtcgacggtgtcgccggcctgcagtcctgccaactgttcggtgccgtgtcccacgacggcgaagatcacgctgacttcgtcgccgtcgacttcgctgacgccgaacggacgcggcatgagcatgaagtcgtcgtgcgtgaacaggttgacgaactgggcgggcttggcatgggaggcgatgaacgggtcgcggaacgtcagtcgcatcacgcggtcggtcagttccgtaacctgcgtgatttcgacgttgtggcgcggcgggaagaatccggccgcagtcgcttccgtaaccacatcatgggtgggggtgaaagttgtcatttcattcctattcagcacatcaagctccccctatcaggggagcggtcaaccgcaggttgactgagaggtagttaaacacactcggctccggtttccagcccacactcacgtatagcccacagccggacaatctacctacctatatacggcaacccgcagattatcgcgcatgtcgagcgccgcctggcgcgcgctgctcgccacaaggtccagcgcctcgtcggcggtcatggattcggagtacttgccgctcttcttccatgcgccgataatgccgcgcgacgagttgacgatggcgccgctgccctgcttgtcgaacatgcctgccacgtccgcggccgtgccgccctgcgcaccgtagcccggcacgaggaagaacgtgtgcggcatacgttcacgcaacgccttgccttcctcggggtgggtggcgccgaccaccgcgcccacgcgggagtagccgtggctgccgatggtctcggcgccccatccttccacaagatcggccacgtgctcgtagaccttcgtgccgtcggccaggtcgagcatctgcagttcgctggaggacgggttggaggtgcgcacgagcacgaagatgtccttgtcggcttcggcggcggcctcgacgaacggggtgatgccgtcggtgccgagatacgggttgacggtcaccgcatcctcatgccacgggtcgaagtcgcccacgccgttcaggtggtgggcgtaggcggctgcggtggagccgatgtcgccacgcttgatgtcgccgagcacgtagaggccctgctgggccgcgtattcgcaggtcatcgtgtagatgtccacgccggcggggccgagcgcctcgtacatggcgatctgcggtttgacggcgggcacgatgtcggcgatggcgtcaatgatcgtgcggttgtattcgaagtaggcgacggccagctgcgcggattcgacttcctccggggattcgaccgagtcacgcacctcgtcggcaaagctcgccacgacctgcggcggcaccagcgcctcagtggggtcaaggcccacgacgctggggttctgagtgttgtcaatcgcttcgatcaggcgatccatgctgctccttgtgttatctacagacggctgaacatcagctgggagccgatgattgtggcgagggggcgtccggtgacctgccagccgccgaacggggtgttacgagccttggagtggaactgttcggggtccacggtccattcctcggcggcgttgagcaccacgaggtcgacattgtcggcgtcatccacgcggctcaagtcgagcagtcggttgacgccttcacgctgcggctgagcgtcgctctcccccgcaatcacgccatccggatcatccccggtgggcgcgggttcggcgtagtcctcgaccagcgcggctacgtcggttggcacatgccccatgagttcggcaggtccaacggacatgagctcgatcagacgctcatcggaaatgaagccgccgtcgacgagcaccttgtggcacacgccgtacgcgcattccagtccgatgatgccgttgggcgcctcaaggaagccgagttccttctctgccaacgtgtgcggcgcatggtcggtggccagcagatccacggtgccgtcggcgatggccgcgatggtggctttgcggtccgcttcggagcgcagtggcggattcatcttggcgagcgtgccgtacttgagcagcgcctcgtcgctcaacgccagatagtgcggcgcggtctcgcaggtaatcggcagtccttcggccttggccctgcgaatcgcctcgaacgagatggcagtgctcacatgctggaagtgcacgtggacaccggtgcggcgggccgcttcgatatcgcgggccacgatcttgagctcggtgtcttccggaatgccgggcacgccaagctcgcgggaaacggggccttcgttcacggcacctgtatcgtgatgctcgcaatgctcgatcaggtacaggtcggaggccttgacgttctccagcacctggtccaggatctccggcgtcacagcggaaccgtcgtcgctgattgcggtgatggggtgcgtgagcatggccggcgtcttggcgtcgtcctcgaatccgggcacgtacttgagccaatcggcaacgtcgcttgcctcatgaccggcgcgatccttggacgcgcacacgcacagatcgtaacgaaccggcaattgaacgtcatgcgcagtatcgtactgctgcaggaagtcgatgacgttgtcgaagccggcatccagaacctcttttgcaccggtcgcttccgggccagacacggtctgcccatccagtgccggcaacgtgttcggcatgatgagcacgttcgtgtatccgccggatgcggacgcacggcagccggagaccatcgattccttgtaggtctggccgggatcgcggaagtggacgtgtgggtcttcgaaaccgggggccacggtcaggccggtggcgtcgatgtcggcgccgtcagccacggcggaggtgtcggcgaagtaggcggcagcggtcccgggcaccacgaggtcgatgacctcgccggtgttccagaccttgatgttgcgtagggtgatgctcacagtttggcttcctcgtcgcagtagtcgcagcggtattcgagccgctcggagtgcacgaggtggaacatctgcttgatgccgggctcggcggtggtcacgcagcgcgggttcacgcaggaaatcacgccgacgatgtgctcgggcaggttcggctgcttcttttcgacgatcttgccgccgcgcaccacgtccacggtggcttggcgggccacgaagccgagcacgtcgaggtcgatgtccttgtcatcttcgattttgatgatgtccttggagccgtaacgcttggagtcggcgttcatgatgagcgcaagcttggttttggccgggtcgattttcaggtattcgagaaccttcagcgaggttccggccggcacatggtcgataatgatgccgttctgaatgctggtgacttccatcaggcctgaacctccttggggttgagcggttcgtatccgggcagttcgtcgcccaccacggtgctttcgagggccatgcgcacgagcatgccgttcttgacctgttcgaagtaggcggcacgcgggtcgtcgtccacgtccacggcgatttcgttgacgcgcggcagcgggtgaagcacggccatggacggcttggcgagctgcagcttctcttcgtcgagaatgtaggtgtcgcgcaggcgcaggtagtcgtcttcgttgaagaagcgttccttctgtacgcgggtcatgtacagcacgtcgaggtcgccgatcacggaggccaggtcgcgcacttccacgtaggagcagttgtcggtggcgttgatgcggtcgatcacgtactgcggggtcttgagctcgtccgggctgatgagcacgaagcgcacgttgccgaatcggcacagggtctcgatcagggagtgcacggtgcggccgaaggtcaaatcgccgcacagtcccacggtcaggtcggtgatgcggccgaagcgcgactgcagcgtggccaggtcggccagcgtctgcgtggggtgcatgtggccgccgtcgccggcgttgattaccggcacggatgcggcgcgggaggccaccagcgcggcaccctccttcgggtgacggatggcgaccacgtccacgtagttggacacggtcttcaacgtgtcggcgatggattcgcccttggtcacggaggccagctgcgcgccggcgaatccgatgaccttgccgccgagacgtagcattgcggtctcaaagctcaggcgcgtacgggtggagggctcgtagaacagcgtggccagcactcgcccatcgcaggtatgggcaacctctttgcggtgggaatcgatgtattcggccttatgcagcaggtcgagaatctggtttgtagacaggccgtccagcgttacgacgcttttgccgaccattggcgtttcttcagacaaggctcaccttttcgctcgtggttttcaggtggccacccttgcgtgacctaatctaacttacgccatttttcggacagccgcattcaccgagtgtccacctgaaaatccaacgaatatgctgccttatcgctgcgcgcggcgtcgatttcgttccagtcgcggtgcgatcacgtgcatacgcgggcgaggggcggtttgcggctgctgcgttgcggcggaggacgtggcggtggttgccgcagccgcctcgccttcggtctgcccatagaacaagcgctggcatacgtcacggcatttgcgcatcacggccagcaggtcgttctcgaaatgctggccgcggtgggcgccgtagccgaggtagacggcgatgccgcccagcgaatagatgtcatcaggcagaatatcggcctggttggcgcgcccgctccacagatagctgccgttgcgggccgcggtgcacaacgtccatgccttgcgcagctgaatcgcgtcgatagcgctgatgagcttcttggcttccagcacgtccaatgcctccagcgtgccgttgacgcgcagatctttgatatcgccggcgtgctggagctgcatgagttgcacggtccattccacgtcagacaagccgcccttgccgagcttcagatgccgttcacggcgcacgccgcgcggcagacgctcggcttccatgcgggccttgagcttgcggatgttctgcaattctgcttcagtcagttccgtggtcgggtagcgcagcgggtcggcgatgttgatcaggaagtcccgcgccagttcagcgtcgccggccgcgtaccgggcgcgcagcagcgcctggcgctcccaggtcgaagcccaggattcgtagtattcctcgcaggaggcataggagcgcacgagcgggccgttcttgccttccgggcgcaggtccaggtcgagttcgatcttgggttccagcgtcgtcggtccttgcaggatgttgcgcaggtcttccacgaccttcttggcgaaggcgttggcttggccgtcgtcggcatcgtcggccggacggtagatgagaatggcatccgcatcggagctgaagttcacttcgcgcccgccgtaacggcccatggcgatgacggtgatgccggccggcgcggtttcgacgccgaactcggcgatctggtggcgcacggcccaggtcagggaggcatcgatgatcgcgtcatacacgtcggtcatggccttgagactgtcggagtcgctgatcacaccgctcatccaagacaggccgatgcgttcgatttcgtggcggcgcatggcgcgcatggaggtggcgaactcgttgatgttcgagccgaaacgttccagcgccgagccggtctgcacgtccaaggcctcgcgcgtgcgggcctgcagattgtcgtcgtcgccaagccagctgatcgattcgaccgacttgttgagcgcgtcgcccaggaatcgtgagttggacaggatgtggcacaggcgctgggcggcggaggtggagtcgcgcaggaagccgaggtagccggattcggtgccgaagttctcctccagtttgcgccagttgagcaggcccatgtccgggttctggccctcgcccagccactgcaagacggcgggcagaatgatgcggttgattttggccgcgcgccccacgccggcggtgagcgcctgcacgtggcggatggcggcgtccgggtcgccgaaaccgatggattcgaatcgttcctgtgctgcctcgacgctcaggacgatctggtcgttctccatctgggcgttgaccggcagcatcgggcgatagtagatgtcgaggtgcaggtggcgtacttcgcggcgggtgtcgtcgtacttgtcgacgagttcttccgggtgcaggccgaatgcgcgggcgagtcggcgtagctcctggttctggttgagctcgtccacgtcgatgtcgcgcttcttttcgaggcctccgaccgaggcccggccgaggtccgggaacaggtgcgtgcgcttcagggaccagatctgctggcgatgttccatcacgcgctcgaagcggtagtcctgggacatgcgcacggcctgcttgcgcgagacatagccgccttcggacaggcgctgcagcgagtcgagcgtgttgctggtgcgcaacgattcgtcggtgcggccgtgtacgagctggagcatctgcacggtgaattccacatcgcgcaggccgccgcggccgagcttaatctcgcggtccttcaggggcgcgggaatcaaatcctccacgcgcttgcgcattttctggcagtcgtagacgaagttcttgcgcttggacgcgctccacacgaacggccgggtcatgtccatgtaggcctggccgaggtcggggtcgccggccaccgggcgggccttgagcagcgcttggaactcccagttctcggcccactgctcgtaatagttcttgtgcgaggagagcacgcgcaccagcgcgccgtccttgccttccgggcgcaggccgccgtcgatctgccacagcggctgctcagccacgcccatgatggcggactggcagacgcgctgcagcacggtgcccatcttggtgcccacgcggatcagcgtctgatggtccacgtccttgtcggccggttcgaccacgtagatgaggtccacgtcggagacgtagttcagttcctgtgcgccgagtttgcccatgccgatgatggtgaagcgcacgtgctcgctgccctcggtttcgtgacgggcgatggccagcgcgccttcgagcgccgcgtccgcgaggtcggacagttcgcggctgatggtcggttggatggaggtcgggtcgtccgccacggcatcctgggcgatgatggcggccagttggttccggtagctggaacgcaaggccgtggccgcttcggccagatccttggaggcgacgggcatggccggttcgtccgggtccgcgccgaccgccttgagcagacgtgcacggcgttgcgcgtgattgaacagatggctgttgcagttgtcgactgctgccgcctccacaagctgcggcttgaagcgcatgaacttgcccatcgcgtcggagacgccgagcaccgtgaccagacgcttcagggcgtcgttgtcggagatgacgtgttccagatcgcgctggctggattgcatcgcgttgacgatatccacgaaattgctcaatgccatatcggggtcgcaggcgtgggccagcgcgctcagcagttcggcgcatcgctcatcgggaatgtcgtccgccttgagctggtcgaacaaggcgcgggccttgtcgaggtcttgcagacctgccctgatgaggtccatggagctgggtttgaacatcgacgattccataagattccactatatacactcatgccctccgaatagggcatgagccgggaaggagtcatcgggcgacgctgatgagctccgaggaatccatatcgtaatcggccatggcgtaggaacggatggcggggtcatcataggtgttcatgtaataggtgttggtcttggacgaatatccgctggtgaacagcgtgcgttcgaactggccgtcgcccatcttcgccatgccgtccatcatctgcacggagccgagggtgtggaacaggcgcgacacattggtggcttcatcgttctgctgcgggtaatgcgcgttggtgtaggccacacgaacgaagcgcgacggggagctcacgtcgcccgggatgccatgcatgcccacacccgcaccccaggcggtcaaggaggccttgccccatgaagtcggttcggccatctcgttgctgacgcacatgtagttgcgcagattttccatatggaagtcgaatgtcggctgattggtcagcacatcgacgtcatcatgatgcacgtgcatgccatcggccatctgctcgacgacgatgctgcgcttgccgtcaccgatgaaccagtgcagcagagactcctgctgtcccggcacgatctgggagacgagcgtcacgttcctgagcgcctcctcgacctcgtcgacggagtcgaaattacgcgccacccacagcggaaattcgaacgtggcgacgttttccgtgccttcgaccggttcgtggacgaacgaggcgtagccggggaaattcaagccggcgatggccagaccatgttcattggcgcagtcgaaatacatcggcctatcggccatgaccacgcccacgccgatcaccgcgttcggcttcgccttgccgcccgcaccgaacaccgtgtcatagtggtagccgcgcggagtgaccaggatggtctccccatatgagaaactccagtcgagattacggccgaaataggtgttgccctcatcatcggaaaaacggacgccggtgcacataacggacttccttccatcgctttggttggcttgcacgttcatgatacccatcggccgctgggggaactctgggtttcgccagcagattaacgtgcggcgcggcgcattgagatgcgccgcgccgcgatatgcatcaaccttgcgtaccgaggaacaacggttccacattgcgccagatacggcgcgtagtggcggggtggttcatcgaatacaggtggacgccgtccacgccgtgggccacgaggtcggcgatctgctcggaagcgtagaggatgccggcggtacgcagggactggatgtcgtcctcccacttgttcagcagggtgttgagcttgtccgggatgcgcgaggcgttgcgctcggccatgcgacgcacggacttggcgccacgcaccggcatgatgcccgcctcgatcggcacggtgatgccggcggcgcgcgccttgtcgaggaagcggtagaagtcctcattgtcgtagaagagctgggaaatcaggtgagtgacgccggcatcgaccttgattttgaggttttcgatgtcctggtccagcgagtcagcctgatagtggccttccgggtagcaagcaccaaacaccttgaagtccggcttcacggagcggatgtatgacacgaggtcgctggcgtggttgaactcgccgaccagctgctcgccttcgatgtagtcgccgcgcagcgcgagcacggcgctcacgccggcttcctcgaacatgtcgagagcctcatcgatcttggccttgtcggagtagagcgcggtcaggtgggcgactgcggggatgccgtattccttgctgatcgtgtgggcgatgcgcgcggtggcggtgcggtcggagtgggtgccgtgaccgtaggtcacggagatgaagtcggggttcagcccttcgagtccgtcgagggtgtcgtagatggtgccaacaggcgcgttgcgcttcgggggaaagacctcaagggtgaacatcggggaatgcatgctgatttccttacataaacccgagctccctcatccagagggagctcggtgatttccgctacttgtcgagcttggcgcgcacggccttggcggcggcgaccaggttctccaggctcggccaggtctcggcgttaccacgggtcttcagaccgcagtcggggttgatccacaccttcttgacgtccatcttgtcaaggatctcgtagatacgatcctcgatctccttctcggaaggaatacgcggggagtgaatgtcgtagacgcccgggccggcctcggtctcgaagtgcgcgtcatgaatggcgtcgagcaccaccagatcgccacgggaggcttcgaaggagatcacgtcggcatccatcgcgtcgatgtcgcggatgatgtcgttgaactcggagtagcacatgtgggtgtggatctgggtggtcggcttgacggcggagtgcaccagacggaaggccggaacggcccagtcgaggtacttgacgtgccagtcggacttgcgcagcggcagcttctcacgcagggcggcctcatcgatctggatgaccttgataccggcggcctcgagatcgagcacttcgtcgcggatggcgagggcgagctgcttggtctgctcctcgtgggtgatgtcctcgcgcggccaggaccagttgaggatggtcaccgggccggtgagcatgcccttcatcacatggtcggtcttggactgggcgtacgcggaccattccacggtgatcgggttggcgcgggaaacgtcgccccagacgatcgggggcttgacgcaacgggtgccgtaggactgaacccaagcgttcttggtgaacaggaagccgttgaggttctggccgaaatattcgaccatgtcgttacgctcgaactcgccgtggaccagcacgtcgaggccgatctcctcctgcttcttgatgacggcgtcgatctgggccttgatgaactcgtcgtaggcttccttggtgacctcgcccttgcgcagcttggcacgctcggcgcgaatctccttggtctgggggaaggagccgatggtggtggtcggcagcagcggcaggccgagggcctcgcgctgcagggcctgacgctcctcgcgggcaggctgacgcacgtagtcggcgtcggacagcttgccgatgcgctcggcgacggccgggtcggcggccacgcgggtgccgtcgaacagagcctggttggcggcgagggcggcggatgccttcttctcgtcctcggtggcgtcggccagggcggcgacttccttgagctcgtcgagcttctggacggcgaacgcgaagtgcttgaggtcttcggccgggatgccggtctcgccttcggtgctgaacggcacgtgcagcagggaggatgcggtggagacggccacgttggcggtgacctgcttcagggcgtcgaccaggccgagggaggtggcgtagttgttgcgccagatgttgcggccgttgatcacgccggcgaagatggtggtgttggaggccacgccatacttggcgacggcttcgaggttctcctcgcgaccttcgttgaggtccaggccgatgccgtcgaagccgagcaggttgacggtctcgtacacgtcggcgatgtggccgaagtaggtgttgagcagcaccttgacattgcccttggcggacaggatcttggtgtacagggtcttgaagagttcaacgtcgcccggctccttgtcgagcacgaggtacggctcgtcgagctggacccatgcggcgccgagctcgttgaacttggcgagcacttcgacgtagacggcggccacggcgttgaccaggcccttgtcgagctcgagttcggtggcttccggggtacgggcgagcttcaggaacgtgtacgggccgatgaacacgggcttggtgtcgatgcccagcgccttggcctcgttgaactcgtcgaacggcttggtggagttgagcttgatctccgcggccgactcgacttcgggcaccagatagtggtagttggtggtgaaccacttcttcatcggcagggcggtcacgtcgcccttgtcgccctggtagccgcgggccatggcgaagagcgtgtcctcctggttgtcgaaggagagacgtgcgtaacgctgcggaatcacgttgagaaggatggcggtgtccagcatctgatcgtagtagctgaagtcgttgctgggaatgaggtcgatgccggcggcctgctgcagcttccagtgcttggcgcgcagttcggcggcggtggccttgacggcggcgaggtcgttggcacccttccagtagccttcgatgatcttcttcagttcgcggttctgcccgatgcgggggaagccggagacggaagtcagagtggacatgaatcctccaatgtatgcgttcgtaacccgacttagggtagcaaaacatccggattccggcccttataaatggccgcagagtgtcgttatagatggaatttatatccgctttagtcgaagtctttcacattgatgaccgcgagcagttcgccgctgtgcacctgccattcgtcgaacggtttgttcgatcccatgatcacgatggatgcgggcgaaagtcccaaattcagcaggtcgagtcgttcgccgtcggagtcggcggaggcgagccattgggcgctgatcgacacagtcggctcgtggcccacgatcatgaacacgcgattcttggccttgacgtgggcgagctcgtcgaacaccgcctgcactcccccgtcatacaggctgatgcggtagtcgacgattggcttgtcgccaaaggtcttgagcatgcggtccaacgtctggcgcgtgcgggtaacggacgagcaggagatttggtcgggcaccagtcccaacgactcgatgcccttgcccacggccttcgcctgtttcagacctttgtcggtgagctcgcgctccgagtcacccttgtcgccgaacggctcagccttggcatgcctcatgatgatgagaatatggtcgtatttcttcgccgctttggcgactttactcagcttgatgcccatccgtggctcccttcacgaaccgtctgcccggtgtggcggtgtggcggtgtggcggtgtggtattgcttccagtatagaggtgtgtgagcgttcacaaactcatcgtttggcggttattcgtgcgtattgccaagttctcccacctgacggtcgaggtcgcgcaacaccttacgtagtttgtggtcggagatgtcgcgcagttccagttcctcgatctgcgcttcacgctgttcgtcggtgagcgagtcgatgtcggtctgtgtgtccttggtcacgcgatcgcgctttctgagcgcctcgaacccggaggccatggcgcgcgagataacaaggaaaccggtatgaccgatcatctggtggtcggggcgtacggcgaggccctgggccttccatgtgcgttcgaacgattcctggatctgcggctcggtccagcagccggccgcgcgcagggcttcggccatgcggctcatctgcgtggtggtagttacgtaactgaccaacacgccgccgggggcaatcacgcggtatgcctgctcgagcctgttccacgggtcgagcatgtcgagcatgatgcggtcgaaccagtgttcgggcagttcggcggcaacggaatcgaagtcgccggttttgagatcccaccagctgggggcctcgccatagtacagcgtggcattggcttgggcgaccttggcgaattcggggcgcagctcgatcgtggtcaggtggccgcgctcgcccacggcgtccagcaggttcacgctcatcgcgcccgagccggcaccggactcaagcacgcgcatgccggagcggatgtcgccgagctgaataacttgggcgatgtccttcggatacatgatctgcgcgccgcgcggcatcgaaagcacataatcggccagtcgcgggcgcatcaccgcatactcccagccgccgatggcgcgcgacgatttccacggcttgttcttgtctttctcggggtagacctgattgacctgtgcctcgcgcttggcatgcacggtgaggattacggtgccttcggtcttgccaatcacatcgtcatgcagaatcaggccatgctcggtctgcgtggagccgccggccacaagctgatcggtgatcttcttgcccttgcggtcggtgaactgcactttctcgcctgcggtgagaggcccgcgcctcggctccataacttgctccttgcgtgctcggtgggtcaatcgctacaagtctaatgcatgtaagctcgctggtgaggtgatgacgatgcgaatgcagatgacaagccagatcgatgccggcggcaatgaccccattttcctgatgttccacggttacggcaacgacgaaagcgagatgatgcggattctcgacgccgtatatgcgccgacgcgagccgatgcggccccggccgcaattgccgccgtacccagctatatctcgttccgcgccacctacgcgaggccctatatgggcggcaattactggtatcccgacggctgcggcgtggacgagcgccaacgcgaatgcgcggcggtcggggatgcggtggcttcactgctggatgcctcggcattcgcccatcgcaggaagatattgatcggtttctcccaaggcggttatctgtcgtatcgtctggtcaaggtgcatccgacgttgttcgatgccgcgatcctgctcagtccttcgttcatgggcgaggaacaggcggcgcttgactcccctacccgattcttcctggcgtatggcgcgcaggaccgcacgattccgctgcccgaccagcaaacggcccatcaggtccttgaacgggccggacatctgacctatcgcgagtattccggcatggcccatgccatctgtgatgaggaaatcgccgatatccgggatttcctacgtaccatatgatgccggaatagcttcaatatggaatatctccgttcaaagaggtacattcgaccttttgcggaatgatatctccgttcaaagaggtaccggtccaagtagaagcggctcaacaatggcggaatggcgttggccgcgcccattcatcgcgcgatggttctgcgatcagctcaattcccctgccggctgatgccgcccttatgaccggtggccttgaatggcgtggcgcgtgccgtcaccttcggccccggcagattcgtactggtattggatcgaccgcggagcccggcagccggctgggactcggggcgtcgaccagtacccgtgatgtcggtatgccgtttgccgtcgtgtgcctgtttcccaccagcaccgtcagcctcgtcaatatcaatgcccttggcacgcaaagcacgcgcccaccgctcatccatcgtgcgcctcacacgtcccattcgggtttccacgtgtactgcatgtcgtaggcgctgggcgaacggcggcaggtggttcaaggtgatcgggccgaatgcggcggcgtcaaaagacatcgtttgctcccttcgatggtgttggccaacaggttccaagggtcaggcacagcgcctttctcaacccgttcgccgtcacgatggctggcagcttgcgttcactggttcccctgcaatgcgcctcattatggcaacacgaaccgacaggtgccggctgcgcctaggatgggaaacgattgctgcacgccgaaaagggaaggcgactgtcatgaggtatttcacgactggtggttggaagaccgccccgcacttaacctgttcgaaagtttggagccgcacgatacggttgagattgagggactcggtggtgcacgcccggaggcactgaatgttggcttggatgcttgggatttgatgccgatgagtgaaacacgggttgtcgagtggttccacaatcacgatgtcggctcgcccgcgaacgggaccagtaaggccgatgattcagttccctcgctcgatatgccgtcgttctgatgtgattcgcggaatgttcgtgtcgttgttctcgtcgtgggtggattgacacagcattgactgccgttgagatgtatgcacgctgaacacgcgcctcaacggcagtggtctcgtcatctctcgctcacaccaacggattgccggctgcctgatacagcgaccaccagtcacggcgttcgagttcgatatcggcaccggccgccatctggcggatgcgctccggtgtcattgagccgagcaacggctggataccggcgggatgacgcagaatccaagcgacggcaatgccgttgggcgtggaaccgtatttgccggcaagacgggtcaattcggcgttcagctcggggaaatgctcgttgccgacgaacggaccgtattccgtgccggattggaatgggcaccatgcctgaatggtcatatgcttcagccgtgaataaggcaggatgccgccggtgcgatcggctgcgggatcgctcgccatattgaattggatttcagcgtcgagcatctgtgtatgcatcaggccgaactgcagttggttgatttccaatttctgacgaaggccgctttgcaatagttcgatctgccacgggcccatattgctgactccgaaatgacgcactttaccgcttgattccaacgcgtcgaatgcttcggcgacctcgttcaactcaaacagcgtgtcaatacggtgcagcagcacggcgtcgacgtaatccgtctgcaaagcctcaagctcgtgatcgagtgcgtcaatcagatgcttggcgctgaagtcatatccgttggcgccgccatcgttttcgccgaaactgtagtcgatgccgaacttggtttggatgaagatggtgctgcggtcgagtcctgcgtccttccacgcttggccgaaacgcttcgaactggcgtgcgcggcatgatcatggaatccatagatgtccgccgtgtcgaaatagtcgatgccagaatcatgggccacggccacggtacgtgccgcatcggcggcatccagcgcgtccatgcgcatcacacccagcgccactcgtgacgcaatcatgccggattgtccgatttcctgagtcttcatagtgtctcatttctgttatcgcgaatcggcgaacgggcactgtccgcctcgttgccgggcagcaatctccattgccgcggcttatgtcaccttatcgcttgaagtgcacttgaaggcaactcgcaggcaggcagcgcgcgctgccgggcgcgtcttcgcgccttcatgtcttcgctgtgaccgagacatcgttgtgccgtaatcatgcctatttcttgtatgatgacctctatagcaacagagctagggggattccatgaacactgccgattcagccaaagtcaccgatgccaatgccggcgcaaacaatgccatccatatcccgcacaatcccacgcttgccggattggccacgctgacccgcaacgtggcgtacaagaccggggccgataacctagtgatggatatcatctcaccacaatccaccggcgatgacgatgaccgccgctaccccaccgtggtattcgtgcaaggcagcgcctggaccacgccgcatcgcgactacgagatcccgcagctctcggctttggcccgcgaaggctttgtggtggccacggtgaatcatcgcgatgcctcgagcgatccccatgacatgttccccgcatatctcgaggacgtcaaagcagccatccgctatctcagggcaaacgcgcgccaatggcacgtggaccccgaccgtctcggtatctggggcacgtcgtccggcggcaacacgtcgctgctggtggggttgaccgccgacgatccgcggtatgaggacggcaccaatgccgatgagagcgatgcggtgaagtacgtggtcagctgcttcccgcccaccgacatgcttgaagcagtcgacgcattcgacgatgagaccaatccattccggctgtattatttcggcccgttcgcggccgtggtgggtgcgacccatgagaccggcatcaatgccgaggtccgtcagcgcgcggctgacatgagcccctacctgcaggtgcgggatgaccagcagtatccaccgatgctcctgttgcacggcaccgccgacaccgtggtcccctaccatcaatccgtcaagatgcgcgaccggctggccgagcacggcgtggacgcgcagctggtgctagtcgacggcgccgaacatgagtacgatttctggagccagcaggtcttcgacgtgatcttcgatttcattcgtgagcggagctgaacggtaagggcacacgggcgcgtcctttttataggttgccgagttctcttttagccaattttgttggagcccctatctgcgcgaacataccatgacagttctagactgtgttctaggactgtcaatcggcaatgtgtatgaagcgtgatgtgatgggtcagacggcgattgatggagttgagggacttaatagggccggtgaaatcagcagattcagcggttcgcggtcggtggcgttgccgcctataccattctggccgtgcttacttcgcgactgttgcaacggccgactaccacggaactgttgctcatcgtcatgtggatcacgctggaactatgtgcgctgactatgttgcacagttccggagctctcggggcaaccgccgccatcgttttggccatcatcctgctgattttgcttatcgccgacatggcctgctacctcgcctactgccatctgccacccatgcccgccttcatcgacggcaccgcaccactgattgccgtaacggtgttttctgagattgtcgtggcgatgattgtgtaggtccggggattttgtttgctatttcgtgttattcaattgtgccccgaatatatatgggcactgccgaatttatgattccaatcttttcctgcggatcggcttaagataattgactctgaaggatttccaatcaccaaaaaaacttgttgtccgtttcagtttgttccccattccggaatttctcacaggtcaattcaagggtgcatagaaaatcgcaacttgttcaagccggtagtcgcgtggagaagcgtcacgatagacaatggcatctatggagagtgcatactcaatcccgcctcgcagggcatcagtaactatctgttggccaccgtcgtaatacaccttgacagtgccataagaatggaaatccgaaagatgcgccaaaagtagattaacaatatcgcgtttgagttgcgcttcaaaacgttggcggttatcgtcaaaatcacttttacgatgcacaaacgtccgatatgtaatcggcagccgccgagtcatgataacgaataaacccagaagcctcttacgctccgataggctcatcccttcgtaagcatcatgcccggtaagcagcggcccagcatggaaagggacatcaggaagtccatagtcagccaacgactggcggtaccgctctaaggcaagactaatatccttagactggtcatgaaaaacaagagtaattaaataatattccgatcgtttaccccactcaccgctctcatcagcgaagatgctcaatacagacggcatcgcacccccgtccccgttgacaaaaaatgccgggggagccccccggcgacttggagcctttctcgtttccgagtaaagcaatatatttatagcattttcagcccctagcccgcaagccacaaacggctattccgctgacagctgctcatattgtagccacgccatctactgcaacatcatgtcacggtgcttgtgccaacggaacagacgctcacgatggcggttcagcgtgaaacgatcccacatctggtcctcggcccactcaaccatgccatcatgttcttcatcttcgggattgcccaaggtatcaaggaaccgctcgaacccatacaccccaccgacatcctccggaggcgcatcccccgccccatcccaaagctgaggatccgcaacgtgcacgctgcggtaggtacgcagcagcttaatatcatggatccaatcgtcaccataatcgtagtaatagcgagcggtacgcgccttgggaaacacgtcgcccagctcggtttccgaagcaatgcgaacttccggcaacggctccaccggcatatattgttcgtatttcgcctcatggtatgagggctcttctccccacaattcttccacttgcacctgcttcccattcggaaatgtggcgcagaagcagaacagatgctcaccgtaccacataaagcattcctgcaataccgcatgcaaatcgaagaacgtcaatgatgccggcaccagaatctcccgccagcattcacgcccgtcaaggcgcaaagtgactcggaaacgaaatgccgtgttgccattgcctgccatgaagactcccttatcaacgatgaagttattatcaccgtaacagagtctggggcaaaccactgcgttacgaatctgattcgcgccctcagaaaaggccgaatcatctgttcaatctccgtgtcctgtggaaaagactctaacaataaccggtactgttcatcatcagcaagtccaatatgccatgtgaccaggtgcgggacactcatgtgatcagtcgctatggtggtgagacgtgacttcggttcgcaccgtcgagcagacgcgaatggggatagccgcgccgcccgtgtccaatatcggctggggcgtgctgccgctgtactggcgcgcactgtccagtatgaatgccatcagcgtgctcgcgtatcgtttggtcgccacgttggcggccatggtcgcgctgttagtggcgttctccgtcctggccaccgcgattccgctggccatgttctcctacggcgcgcagcacagccattacctgaccgtgagtttcatccaatatctcaacccgctgatccagttctgcgtggctgtgctcctgctgcacgaaccgatgcgcgcgcagggctatgcggcgttcatggtgatttgggtcgcgatcgcggtgtattcgttcggcgcgattcgggcgtattgggagcggctgaagccccacgcacgttaagcgcttccttaactcccctccccgaggggagctgtcgccgtaggcgactgaggggaggtcgacacggcaaacagcagaaacctcgctcccgaccaaagccacaaacaccactcacgaagcaagcttgtacaagttctccttaaattcccgctcactccacttaatgggatacgcattgtacttttccaaagcggttattagctgattgtcaatgcgccgatccgaatcattgaggaaaacaaccagttcacttggtgtctttcgtgccgcctgcgtatcctcccatgaaataaggtactggaaatgagtcgctgggaaggccgcgtaatagatgtgcagaatcgttccgcctgtttactcgtaaacggcaacacaaagtcatactggcacagcaaaccagacttgccacggaactgagcgccttccacataccgtatgttgttcgcattaaggaacatacgaatgtcatctgcaaaatacgtctgcacatgggattggccagcatagacatatcaccaactttgatgatagcttgcaggaaccgattcttggcatcagcaaaatcagcagtatcgctcgtcagagtaagctcgtcgccgttacgttcaataccaaactgattcagaatatctttgagcactgccaaacgcgattccgtcacagtcatcccatgcgactccaaacggcgtaatgtggcacagtcatcagagaacgttacgctgttcttcccgggcttcacatagaactgcgtatagtcgttgtcttcatccagaagtggaacattaacttcataccactcatccagttgcgtataagtcgtgttatcagacagccattttccgtaacttcgaattaatgagtcaaaatcagaactcgtcatactttcttctcgtcgtaaacactacgattcatttgactacaaacttatctgatgcaattggaattgcttctcgcctttattcagggtgatggacttcggagacaaagcttccttcagcagttccagcatacgacgagcttcagcatctgtcagtacagccattgacgcctcttccccgaatgcgattacccagtgggaacaagactacatcagaccagtatgcaccgccaagcggcgagtaacactccacccgctacaatcagcagtatggttgttccgcaaaagccaacgctggctcaattcgaggtcatgttcgaaggcacaccgttgattcttgaacgtgccaccgattactgggaatcgggccgcgtgagttcggtgcaggagattgcgccgcagctgcatcacgcgcaggtgtccggcagtgccgatgactgttatgacgttgacatccgcctcggcaaagacgctcacggcgagaacgccaatgaagcaaacactgatggccaagccactaccagcagtaacagcgaccacgaatccacaaccgacgacaattcgattcgcatacaatccgccgcgtgcacctgcccgtatcagagaacaccatattgcaagcatataggtgccgtgctttacgaactgcgcaaacagctcattggcgcgcacggcaatcaccacaatgatgacaccgccaacgctcacgatggtgtcatcgcactcccccgcaccgtgctggatcccatccagcaacacctcgacgcgcgcgcagagcagggcaaaggccatctgctgttcctgtggtccacccaactgcgcgaagccgcaaagacgttctgcgcccagccagacgaagaacgaccgctaatcccgctgatcgacgcacaaaccatgctctccgacacaatccgccgatgccatgaacgtttcattattcatatcagtaagcacagcgatgcgtacagcaaatcatgtgactacacagaattcatcaaaaccgtgcaggctatcgcgggcaatgccctgcaatccagtgattacgcgagcgcatgcggcaacctgcgactgtgcatacacgaagtccacgcacttctgctctcgtccgagaacgatgatggctccgaacctttgctcacgcttatggatgatctggcgatgcgcgtgcgatgctatatggagaatgtggcggaattcgccgactcctctaccgccggcaagacattgaacaccattgcgcaggccgcgaacgacaaggacatgcggcaatgcgaaccattgaacagtatgttgctgatttccagcgcgctcgctttcgcccaatatgacgacaaacgcatatgggcctatgacgtgatcgagaacgcgataacgcgcaatctggaatactcgttcaacgaagagagcgaagaaagcgacgaggacgacgaggatgaggataacgaggatacgagcgaagtagacgacgaaaccgacttcattccggatgaatcgttacacgtattgcagttgttcacactcatgagcgcctacgacctatacgctctatccaacgatggcgctggacgcgagcagcttctgaaagactacccggagtcaatggccctcacactgatgaacactgcgaacatgattcatgaagggcacttgcgttccgcatacatgctcgcacaagatttccttctgtcgagccgggatatggaagatgtcgatatcgatgcccggcataacggtctgctgccggacctgctgccccatggatggcataccatcatggaatgctgcgccgagggactcaatgacgttggactgctcgccaacgtgtatcggtactacattctttcctgcaacgacagatccgatacccattacgtgagtaaactacgcaatctgttacgcatctacggcggtcttagcgcagaagaatggcatgacgtggctgatgggctggccagagattgcgcccggaacatcatcgaccgcatcaagtaccagccggaaataaccaccaaaggcggcacacagcgccacagcagttggcgcaatcccgcttacgagaagctcatcgtggacgagcggctttcggacgcggccctgacttattgcgccatcgtcgattacccgccgctgccattgctgcgcaccatcgccatcgaacaccccgaatcggcaaaatcgataatcctcgacgcgatgccatacggcaccatgggcatgcccgtgttccggtttacggtggaacgtggcaccaataatacattgacggcacgccgcaacacataccagcagatcgccaaacagttgcgccgtttcgccgcagtgttcggagatgaggagacccgtgtgctggcacacgagattgtcgagcgttatccgaatcttaatgcgctacgcgaggagttggcgtttgcgttgtaggggcgacggtgacaacgcggtacggcatttggcacgcatccggcgactatgcagagaaatgccagcctgttcttcgctgagattcctgatgatattggtcagctggctgcaaacccagaccttggccaaatgctcgtccatgaggaatcccttgcctttggcatagcgaacgacgacacccggcatgttgagtgcattttcagcgcattcaacatcatctgcgtgcgcttcgcgtgcattttcagcacaatatccgtcacataccttaatggatgcagcactccttcaaacgctgctgcaggccttcgtccaccgcgaaaaggtacagaccgtggacgccgcgcttgagcaggacattcaactcatgcttcaaattttcttcggcaaaatctcctaaatctttgcgcttattggttgccagatagttttggctggcctttgcatcgaacacgattcccccgttacgatacgtcaccgagggtccaatgatcacaccggcatagttcaaatcaaacccttggatggtgaagatggagccaatctcatctatggtgtacggcttctccgcccaagacagttctttgtcgatgcctttcctgctcttcggagcggaatcttcgagctgatagttccaaggcttgcagaattggtcagaacttattgcggaatgatcgaatccatggtcatccgcaagtcccatacgccatacgccggaagtatcgcgatgcagttccacattccaaaagccatgcggatcattctgattctcagatttcgccgaatacttccagtcataggtggccaacaaacgggacagtccagccccatcccaaccatcgggcttcagctgggccttcgcgtgaatggcattaaacaaatcaaccggcgagtcgaacaccttaacgtcataaggttctcgaatcacttcaccatctgcggcatactcgcccgtatcaacgggcaaaggaccgatacctttccccgaagcgaatcggtcaatccactgaatcatcgacttactcgcggcaatacggaattgctttttcaaatggacatgcgcaacgtccacggaaatggacggcagatgatattcggcgcccaaatcaaccgctttgaatgcgccgattttcccggtcgcgcatgcgatctgagtcgaatcagagtccagctgaagtttttccagcatcgctgggtcccactgctggctggactgcataatctgattgtgatcaaagaccgcaatcaccacccgggctctgcgcagaatgtcatacagatggttcttcccggaatacccctgatttccttgtgtcatcaacaaatgggcctcgtcgatgagcacgatgtccgccaggccttgcggctggtctggaatgcctcgaccatgctcgttgcgtaagctgaatcgattgatgaactgactgggcagcatgaccacttcaccagattccttctgcaaacccagtttcgtggcaatctgattatatacgtgcacctgttccttatgattgacaagaatgtatgaggaaagccggccattcgccgttcgtggcagctcaggataatcttcgtcttcggaataggtgtcgccttggatgccgatttcagccgcgattctgtagaacaggtggcttaacaggaccgttttgcctgtccctgcagcaccttgaacaaagattaatttcggatggcggtctgaagatcgctcatcggctttcttctgttgccggctatcggcaaccaaggcggcaagttgcaccaaaatagattcttcggcttcgagctggctatcgctgagtttatgaaaaggcgatgccttgaacaacgcggaatctcggatgatctcctccgccgggaacaggtcagaatcttccttgtgtaatctcaaccagatttgcgagaaaatccgatcaaactggtctgcggtgtaataatcgccttgcgcattggtccgtcgattgttgagccttttcaccgaatcggtactggacatatagtgcataagacggttttcgacatccagggttaacgacttattgaatttgggatgtgaaataacatattgccgatatgcatcatcattccgcgagacagcatcagctacagctttccagtcctcgcgttctttagcatctctttcaagatgctggaatgtacgatgccgtatatcgttggtctcaccgacgtacaccgtatattcgttcttcatcgaatagcgattggtctttcctgaatacacgacataaaccgttggatatgccaacacatatcgcagcatgaaatgttccagatcggaatcattaacactgcgccccatctgcttctcgagggattcgtcaaaagccttttcaaaagcttccctactgtattgaccatatggcaggttgatgacaaacggcgccaagctctcactgttcatagtcatattatggtccatcatgagctctggtacatgaccaacattcagcaagtcctataatgtcagtcatgatcagtgacagtaccattcagtcgattcgtgattttgtgtcggagcgtggctggggccaataccacactcctgagaacctggcgaagtccatcagcatcgaggcgtcggaattgctggaatgctaccagtggacgccgcagtcgccatccatggatgagggacatgtcagggaagaactagcggatgtgcttacgtattgcatcatgatggccgatgcgcttggtgtggatatggatgacatcgtcatgggcaagctcgcaaagaccaagagcaagtatcccgcggaagccgtccgtgatgacttcgaggaatacgagcaccggcatctgaatgctcgtaagacggatgacgatgctcaatcttcgcctagcaagtagcttgttcccatgcggctgctatcaccatgccgtgattccgacaccaccacgcgataatggtacacatggaaccaatcaaggatgacggacggccggtggcattggtcaccggcggcacgagcggcatcggcaaggcgactgcgcggatgctcgctgtgcggggttggcgtgtgattgcagtgggactcggtgcggacgagaatatccctgagactcagcgtcttggccacagcgaactgtttacctacgagatggatgtcaccaaacggtatccattacctcatgtgtatatgtagtatcaaggtcggggatacagtacaacacctcaaatattcgcttgacagcatgccaatctccctctgtcaatccgcgatatttcgggaattcatgcatcgtataccacctcacacaattcaatgcttcatgaggaaactctgaaacttggtcttgcgattcatctaattcccgacgtcggctctcacgcattaagataagcaccgcagccacatgcttgcagtacgttgcacgttgggaatattggcatgcgcaggcggcagaaatcactttgccatggcgcaaacgaatgtccacttgatagtcgtcattcccgcgaaccacggtatgccaaagattctcagcaatcatgaccggcggatcaaccttgccggcatcgtaataagcttctccacgcacaaaaatcctgcgttcaaacaattgaaagaaaccgtcatccacttctgctgtcatacggcctccttgccctatgtatttcaggataacgcttgtcacccgctttttgtcatgtcctgcgatattttcaattgctgcgagcatcgcccggaaccagcattcgccttcggcgttccatggaccattccctcatattcgggactacagtaagcggcagatgtagccgattgtgccccagtccgaaggaggacattataggattgtttgattcgctgaagaacatgtttgcgcatcacgaacatcatcatggagccagtatcgggcagtcgctcactctcgccgatgccaaagcaatacttgcctttattgtggtgcatcagcagcttgcggacatgcgcaaggtagcggatgcagtcaagcaattgcaggatgagatgcctcagtacatcacattcggcatgtcgcattattacagtgagcccaagcgcgtgcgcttccagtccgaaggtggcaagttcatcgatgcggacgccatcgccaccgcatttgccgagaccaccgtattgcagaacgagtgcgaaatccagcatcttatgggcgatatcgaagacaaccgtgagcatcgcgatccggcaaagacgccagcagtaccgattgacgaacttgtgcgcgtcaccaatgaaaggcttgcgaccggcaacgatgaggagcgaagtcgtgcatggctgttcgccttattcgatcagctcgatgacattgccgaggcgacaaagaacaacctggagccgcttgtcacagcgttggatacgactctacaaaacagctccgctactattggcaactccgccactaccgacgccggcaacagcagcaacaatgccaatgccggcgatgcacgttcccgtatcatctccctaatcgccgacgctctcttcccggccgcagaatcctcgcagacaagcgagtcctcagcatccgccgccctccgcgaactgatgctcaatcccaccgcaacatcgctcgattacatgccagccatagacgtactgcgcgcccacggtctcactatttgccggtgagtccgagaagtcaaccggtggctcatgcggcagtggttcatacggcacgtaccgcacggaactgctatgcacgaaccactgtgtccgaacaacgagaacgcgctacttctccagcttctccaacttttccagtgcctttaatagcgaatcgacatgtcctttggcacgcacgttgtagcgcgcaatcgccacggaaccatcgggattgatgacgagcgtcgagcggatcacgcctacgtgcaccttgccgtagagcttcttttcgccgtatgcgccgtacagcttgtgcacggtcaggtcgggatcagacagcaacgggaacgtgagatgatcgcgctgtgcaaacttgcgcagtttgtcacgcgagtccttggagacaccgagcactgtgacattcttcgacgccaatcgggcgagattgtcgcggaaatcgcaggcctcggtggtgcaaccgggcgtcatcgcggccgggtagaagtacagtacaaccctgcggccggcatcaagcacgtcagacaggttgattgatccgctctctgtaaacccaggtataaccgccggcagagtgaaatcgggcgccacgctcccctcttgcagacgttccggcattgaatcagagctatcaacagtagtggtcatgattcccatcatagaacccttatcaacagcgctagtaaagttattcagaggtcagtcacacaactgcggatcggcaaaacggcgattctgcaacaccggcaatgttcgacgcgcggaatcaagacactcacgactcagctcagcagtaatgagatcggcttccctatcgcccgccgccgcatcacgcgcgaatccgtcgatgatctccagattccgttccggttcctccgccaccgtaaattgcgcaaccgcgacggacagatgaccactatcttcgcatgatgaacaaaccattttgaattcacaattctctatgctcggcacagcatacgttgtgccacatcgatataaatattgcaatcgaaaatgacacatacggcggagctcatcagctctccagaagttgcttcaaataagctgaatcatgcacccgcactggtcgagtatcctcatcaaagcctccattggtgtctacctgctgcttgatgaaatcaaaaacctgctgaggagtgacacgaatgctgacttccatctgttctttcattatcgtcggcataagatcgttccctccttccccgttcagtatatattcaacttatttctcactactacagcacgaaagggtcctccgtctgagagcaaacgacatagcctcacaccagtcccaacgttttgaaggcgttggccaggccgtcctcgtgaatgtcggtggtggtgaagtcacagaaggcttggatgccgtgaatggcgttgcccatggctacggatgtgccggcggccttgagcatggcggtgtcgttgtcggagtctccgatggcgatggtgtcggcaatggcatagcccagcaaagaagccacgtcgcgcacagcggtacctttgtcgatgccattaatcagcaactcgccattgttcggggaaatcttgtcatatgaaccatgcacgagctcaaaccatgggctcaaatcatgttgagtctcctcgaaagtcacgtcaggattcggcgaggtgaagtatgaccccttgctcacacgaatcgtctgtcccaaagtcgagccagccggcacctccacctcatccaacaggtgccagaatcgcgcgaattcgccacgattccaggtcttgcctttcgattccagatgttgacggtagccttccgagatgtacatgccatccgcaccttgccattggtagctctcgatatgatgcttggcaaaatacgccatcgccgcatcgaccgcttcaggagggacgagatgctggaacagcagcctgtctccgatattcgcctgagcgcccgccacggaaaccacgccatcgaaaccgaggtcgaggatgctgcgctcgattttcggcacggaacgcccggtgcagatgaagagcttgtggccgttggcctgggcttgtttgcaagcgattttggcagattcgggtacgacgtggttttcgtcggctagggtgccgtcgatatcgatgaatacgagtttgctattggttgtcatggttgccttcgtaactggttgcccccagtcagcttacgctgacagcccctctccagagggggcgaagaaaatcccgcctaaaacctacaagcatcacacggcgtaggcggcccagcggccgtgggtgtgctggacttcgatgggcataccgaacaattccgacaagcgttcgtcggtcaggccattctccaacgaaccggtgtagacgatggtgccagcaccgggattacccattgaatccacgcccgcttcggtggcgtcctcagcgggaatcggcttgcgtcccataatggcgatgtggtcgaaaccggccggaatctcctccaagcgatgggtgaccagcaccacggcacgctcggagttctcttcgccgattcggctcaatgtgcgcatcacctgctcgcggccgcccaggtcaaggccggtggtcggttcatccatgatgagcagctcgggatctcccatcagcgcacgggcgatcaatacgcgggtgcgttcgccttcggacagtcgccacatctccttgccttccagataggagacgcgaaaatcgcgcagcagctggcgggcgcgggcgtattcctcttgcgtgtaggtgtcgcgccagcgcccggtcacggcggacaggccggtgaccacggcgtccagcgggtcctcgaactcggggaactgccggcccaggtcggccgaggcgagaccgatgcgggtgcgcagtttgaatacgtcgtatttgccgagttgatggccgaggatgaatacgcggccttccgaggggaacgtgcgggtggccagcatgccgaccgcggtggatttgccgatgccgttcggaccgaacagcacccaacgctcccccgcgttgatggtgaggttcacgtcggtgataatgacgcgacggttgcgccggaattcgacgttgtcgagttggaggacggtgtttgtcatgagtgaaatactaactatgattcgcgatctgaggactcccctcagtacgcttcgcggacgactcccctcaaagaggggagccaagaaaccggtacctgaggggagctggccggcgcagccggactgagggggggcactcgttgcagcgctacttacttcttctgctcgtcgagcacggactggtagacttccacggtcttgtcggcgatggtctcccagctgaacacgtcgcgggcgcgttcgtagccggcctggcccatcttcttggcgagttcggggtcagccatgattttgtcgatagcggcggccatatcgtgtacaaacttgtccggatcggtgggagtgccggtgccgtcgtgcaactggtcgatcggaaccagatagccggtttcgccgtcgaccacgacttccggaataccgccggtggcggatgcgacgaccggcagaccgcaggccatggcctcaaggttcacgatgcccagcggctcgtagatgctcgggcagatgaaggcatcacagccgtgttccaaagcattcagctcaggcttcggcagcatttcttcaatccagacgatgttgccgcgttcctcatccagcttggcgaacgcgatcttgacctcttcggcgatttccggggtgtcaggcgctcccgcgcacagcaccacctgaatgtccttggaaatcaggtgcagtgccttgagcaggtatggcaggcccttctggcgggtgatacggcccacgaacagcagggtgggcttcgaacggtcgatgtggtaacgctcgaacaccttccaacccggatcgtctggtgccggggtagcgaagtcggccatggtgatgccgttgtacaccacaaccaccttgttcggatcgaggttcgggtaagcagtcagaatatccttgcgcatgccaccggacacggcgatcacacgatcggcgtgctcgtaagcatccttctcagcccaggagctcagattgtagccgccgccgagctgctcacgcttccacgggcggaacggctccagagagtgcgcggtaataaccaatggagtgccgtgcagcatcttggccatgtagcccgccaagcaggcataccaggtgtgcgcgtggatgatgtcggcgtccacatcattggcgatctgcaaatcaacgccgaaggtcttcaatgcggggttggcatcagccagctcagaaggcgtgtcatagccgacgaccttcaagctgcccttagcatcggcagcattcgggatagcaggaatgtccgcctcggtgcgcttgccatcaaacgcacgaacggttacgtcgatgcgctcggcaagcaccttggacagttcctcggcgtgtacaccggccccaccatagacatgcggcgggtattcgcgggttagaatatcaactttcatcggactgcctctccttcgtgcgtcagaaagaaactcaagcacttcttactttagggcaccgcatacaagaaaacgcacaacttccgtcgtgcgttttgcttttcaagccggatttaccaggcaaaaaaatcagacggccgtgccgttctgatccaaattcggattatgcttggaatcgccagccgtaaagaacaggctcagcacacccacaatgaacaccgcggaaacggtgatgatcagccacatcggatggcttggcagccacataaccacgaagaacgcgataatcgcgatggcgatcagcgtccagctgcccacacggaaccactgacgcagcgaatgcggtgccttgaacatcttcggattcgtgtagttcgggttagtggtcagcagggtttcggtgtccgcaatcgtaccgccgctgggcttccattcggtgccgtcggtgccgtcctgcagacgctgggacttctgctgcagctggtattcgtcaatcattcccgaacggccacggccacgggtctggtcatactgcgacggcactcccctgcggcctgctttggcttgggcacggcgttctgcacgattcggcatttcactactcctgtttcgacggtgacactgttggctatattactcgcttatcggcggcaatttgccaccagtccatcggaacccactgtgtgtcattgtattttcagtcagtgatgcgggcagtcggtgatgcgataggtttgcgtatggaagtcgcaagtgaccgcagtgccgtccgcgaataccgaacgctgcaccagcggatcatcatccacgaactcgtgacgaaccagttcctgcatgccgacccgctcatggaatgcagcgaccgtatggcagcgttcgatgtcgttttccgtgcgagcgcgctgttcgtcgtccatgtcgccgtcaacgccgatgtatgcggcatcgcgaatcaggtatggagctccgccgttgagcaaggcgtacagcatgtaatcgtcgccgtccaccacacgctccatcatccacggctcgataacgcaatcatggtagacgaggttatacagcggcaccggcacaccttggcgcggctcgttgggtgagcgcatctggaagtcgtatggcgcgtaatggcagaatatcaggcttggcactgcccagtccgatacctcttcggacgaggagaggatgccgtgcgagagcagatattcgaagcattcggcgcggcggtcaaagcattcgcggcgggtcatgcggtgttcggggttcgagcattcgtcgccttcgttgcaggtgaagacatccaagtatgcacagtcgagcttgatgccgtgtgcggcgatttcggcgaaattgcggcgcacgtagtccggtgcgagctcggcgcacaggtaggtctggcggccgcccgcccagcgtgcgtgttcgggcatcgtaccgtctgccagccgaatcgcattgttggcatcaaaggtttgcgcggtgaagtagtaatcgcggtactggtcatgcgtgccgaaaatatcgccttgctcatggcaggcgtcgaccagcgacttcatgccttcccagccgcctgcctcctgacaggccggcagatagtcggggtgtgcgttgtcgtatccgggctgtgcccaaccatccaagtgcatgtacagtcggcctgcacccatgccgtgcagtgttcgcatttgcttttcgcgctgtgcgaaggtgaccagcgactcgtttttctcggggtggtccttatcgtagtagtacgagtcgggctgcactttggttttgatgccgatgtgcacccacgagcgaccaatcaggtcacgcacggagggattgcgcgccgccttttcggcgagcgtacgcaggcgacctcgttcgttgacgtacgaacgataggccttgcacaccgccgtgtgatcggcgtggtcgaggaactggtagcgtaccacgcggcgataattcattgtgccgaggcttggctcaaaccaagtattgatatgggtgtacgggccattgctgggatggtcgatgccgtaaccggcattccatggagtttcgcagatggcgatatacccgtgtccgtctgcgcggagctgcgcgaaccacggcatgtaaccgccagccgtttcgaagcggccgtcgaaggcgatgtctttggtgctcacggcggtaggccatgtgttggggatcatcacaccttgctcatgggtgatgagtgtcgtgtcatggtcgtcggcgcaatcgaagtccatggctgcgggccacgtcacattggtgatgttcaggccttgctcattgagcggaatccattcgaagagcacatcgcctgaggcacgctccacccatacataggtttcaaaggagtatgcgctgtgcccaaagccggtgaagatgctgcgaatgccggttcccgtgccggtttcacgctgctcatgggtgatggaagtggcatccgcgaacgcgaaggtgccttgcgcgcattgcagggtcggcttgaaatcagcgcaggtattccattcggcaccgtcgcgcgtaaaagcgaactgcatcgttcgttcatcgaatcgcacggtagtgccggatacggtgaattccatagttaatgtgctcctgtatgttctcgattgctcccgcttacgggagctcgctcatataacaagattaggggtggtccgctgtttgagaccaccccccagtcggctttgccgacagcccccgccagcggggggctagcgctgtctgtttattacttactgcttactgcttcttggtcagtgcggtgaacactgggccgccgccgtagtcgaatgcgacgccggagattgcggaggtgctggctgcggtggcattctggttccacaacgggatagccggaaggtcctgcagcagaatctcctcaccttgctgataatacttgtcggcttcctcggtggacggggcggaaagagccttgtccatcatggcatcgaactcggggttcttgtagttgccgctgttgccgcccttgccgtcggccgaactggaatcgtacagctgtaccagatagttgtccgcggatggataatcagggccccaaccgctacggtatgcggaggtcatcttgcctgaatccacattggacaggaattcgtcggaagtggacatcgggatgctcttggcatcgatatccagcgtgttcttgatgtagttgcagattgcctcaacccagttcttcgcagtgccatcagcattgtatgcaatgccgaactcaccgctccacggggagatggcgttggccttggcccacagttccttggccttggacgggttgtacttcagtacttcatttcccttgagttccttggagtaggcgctgattggggctgcaaggaagtcgacggcgggcgtggcggtaccgtggaagatcttctcggcgacggtcttgcggtcgatggacatggaaatggcctgacgacgcaggttgccttcctcgttctggccgaagtgttccagccattcaggaatggtgaaagtgagcgtattgccaccgggctcgttgtatgccttcagcgacttgtcggattggaaggaggtaagtgcggtgtcaggaatcgtgttcgtgaagtccaggttgccaccgcgtaggtcggcgtatgccgaatcaggcgaggtatagatcttgaagttcaggccatcgttcttggcgacacgattgcccttgtagtcagggttcttcaccatttcgatgctgtggttgtgctgccaggacacgaacttgtatgggccgttgctcactgggtgctgaccgaacttcttcgggtccttgaacgcggattcgggcaacggcatgtaggcgtggctgccggccttgaccgggaatgccgagtcgggctggctgagcttgacatcgatggtgttgtcgtcaacgacggtcaggccgctcagcgtggccttggggtccacgtccggcttttgcagatcatcatagccttcgattgtgctgaagaagctggcgctggcctgcttgttggcactgttggcggtgtaattccatgcgtttacgaaggagtgcgcggtcaccggagtgccgtcggtgaacttccatccgctcttgagcttgatgacgtaatgcgtggcgttgtcgctggaggtgatgctgtctgctacctcgttgtggatgccgcccttcgcatcgtaggtcaccagacctgcgaacagctggtctacaaccttgccgccaccggcctcagtggtgttgccggggaatagtgggtgtgccggctcactgccgtacacggaaatgatattggaatctgaagcattgctggaattggaggtaccggtcgatccgcagccgctgagcagcatgacgattgccgcaccggccgcgaccagtgaagtgacatggcgtgtgttcatgaatctctcccaaatattctggcgtcatctttttggcgacgaaagacaccataggagcttcatgttaaccacgtatgcaatattctcgaaatataaacattactgaaggctcaaggcagtaattaatcccagaaacgcaaaaatcccctcacgaagaagggattttcatgtttctgtttggaaagtattcagcgaggcagcatcatcggacgctggctggccttgatcggggccggcagctcgctcttttccttggagaggtactcgtccacggctgcggcgcaggagcggccttcggcgatggcccagaccacgaggctctggccacggccggcatcgccgcacacgaacacgccatcctgggaggtggcgaacttgtcattgcgagcgatgttgccacgcttgtcgagttcgacgggcagctggtcgaggatggtctcggtgtccggatgcaggaagcccacggagatgaggaccagatcggcgggcagcacgcgctcggtgccaggctggcgagtgaacggaccattttcgccgggagccacggagacgaccttcaagccggtgacatgaccacgctcatcggccacgaagccttcggcggtggtcgagttatcaatggtgaccttggccttctcctcttcggtgccctcgaagttcacggagtcggtggagtagatgtactcgccgccctcttccatggaggaggtcttctggtaggtgcgggcgaaggtcggccacgggctgttgtccggacggcttgacggctctttcggcatgatctgtagcacggtgacgtccttcgcaccctgacggatcgaggtgccgaggcagtcggaaccggtgtcgccaccgccgatgacgatgacgtgcttgtccttggcggtgatgtcgtgcaccggcttgacgccgaagatacggcgcgtggcgtcgggcaggaagtcgagggcgaagtggatgccgtcgagctcgcggcccggaatcttcatatcgcgcggcacgcgggagccgatggccactacgacggcgtcgtaacggtcacgcaggtcatcccacgtgatgtccttgccgatttccacgttggtgcggaagcgggtgccttcggcctccatctgcttgacacggcggtcaagcagacccttctcaagcttgaagttcgggatgccgtaacgcatcagaccaccgatggcgtcgtccttctcgtagacgacgacggtgtggccggcgcgggtgagctgctgtgcggcggcaaggccggcagggccagagccgacgacggcgaccgtctggtcggtcagacgctgcggcggcagcggcttgacgtagtccaaatcccatgcctggtcgatgatggtctgctcgtcaagcttgatcatggtcggcggctggtggatgccgagcacgcaggcctgctcgcacagggccgggcagatgcggccggtgacttcggggaagttgttggtcatggacagacggttgtaggcgtcttcccacttgccctgacggaccaagtcgttccactcgggaatcaggttacccagcgggcatccggtcatgcagaacggggtgccacaatccatgcagcgggccgcctgcgtttgggtccacggttgcaggccggtttcggcgtgaacgtcgaaccagtccttgatacgctcctcaacggggcgttcagccaactctcggcgggtacggaccttcaggaatcctctcgggtcgcccatgtcagcgcgctccttccataacctgctcgtacaccttttcccaggcgccgggcgcattgaaatctacattgttggccttggcttcttccatggccttcgtcatggccacgaactgcttcggcactacgtgcgtgaaccgcttgacggtttcgttccagtcctccagcagggccgcggcgaactgggaaccggtctcttcggcatgctgcttgaccagtgcgtacaccagcttggaggtttcggcatcaagcgacttgaagagcagtgcaccggacttgatggcacccgggttgaccttcttcatatcaaggtcaagcacataagtgttaccgccggagaagcctgcaccgaagttgcgtccggtggggccgagcaccacaacagtgccgccggtcatgtactcgcagccgtggtcgcccacgccttcgaccacgaacgtggcaccgccgttacgaacgccgaaacgttcgccggcgcgaccggctacgaacatctggccggaagtggcgccgaaaccggtgacattgccggcgatgacgttgctgtgcttgtcgaaggtgacggtgtcttccgggcgcacgatcatgcgaccgccggacaggcccttgccggcgtagtcgttgacttcaccgtagatgcgcatggtctcgccgcgcgggatgaacgcaccgatggactggcctccggaaccgtgcagggtcatgtcgatggtgtcgtccggcagaccttcctcgccgtaacggcgggtgatctcgtagccgaccatggtgccgaccgtacggttgacgttgcgaatcggcatttcgatgcgcacgggttccttgtgttcgagggccggctgggcaagttcgatgagcttgttgtccagcgccttctccagctcgtggttctgctcgatggtctggtgcaggatcgtgccgggtaccgggccggcctgcttgagcacgttggtcaggtcgatgccgccggacttccagcgcttgatggcctcgtcctgatccaaacactcaacgtggccgatggcctcctcaagagtcctgaagccgagctgggcgaggatctcgcgcacctcctcagcgatgaacatgaagaagttgaccacgtactcgggcttgcccttaaagcgggcgcgcagctcaggatcctgggtggcaatgccctgcgggcaggtgttcttctggcaggcgcgcatcatgacgcagccttccacgatcagggccgcagtagcgaagccgaattcctcggcaccaagcagggcggcgatgaccacgtcacgaccggtcttgagctcgccgtcgcactgtacgacgatgcgggagcgcaggccgttcaggatcagcgtctgctgggtttcggacaggccgatctcccacggggtgccggcgtgcttgatggcgttgagcggggctgcacccgtaccgccgtcatagccggagataagcaccacgtcggcatggcacttggccacaccggccgcgatggtgccgacgccgaactcggaaacgagcttgacgtggatacgtgccttcgggttggccatcttcgcatcgttgatcagctgcttcagatcctcgatggagtagatgtcgtggtgcggcggcggggagataagctccacgcccggggtggcgtgacggaccttggcgatccacggcgggaccttggcaccgggcaggtggccaccctcaccgggcttggcgccctgggcgagcttgatctgcaggtcggtggcgtgcacgaggtaatcggaggtcacgccgaagcgagcggacgcgatctgcttgatgcggctgtagcgctgcgggtcgttgatacgatcgtcggattcgccgccctcaccggagttggagcgtgcgccaatcgagttcatggcgatggcgagcgtctcgtgtgcttcctgcgagatggagccgtagctcatggcaccggtggagaagcgcttgacgatctcggaggccggctcgacttcggcgatgtcgatgggcttgcggttggtgttgaacttcatcaggccacgcagggtcatgagtcggttcgacgtgtcgttgatgtggtgcgaatacttcttgaacatctggtagtcgccacgctgggtggactgctgaagcaggaagatggcctcgggatcgttgaggtggtcctcgccggtgcgacgccacttgtagtcgccgccggtgcgcaggttgcggtgcggggacgcgctccactggttcgggtaggccacgcggtggcggatggccacttcttcggcgatttcttcaaggctcacgccgcccacacgggaggtggtgccggtgaagtattcgtcgatgacttcttggctcaggcccacagcctcgaacagctgcgcgccacggtagctcatgatggtggagacgcccatcttggacatgatcttgagcacgccggtggagagggccttggtgaggttcttcacggcggtgtccgcgtcgaccttgaggtagccgttgcgggccagatcttccacggattcgaatgccaggtacgggttcacgcaggcggcaccgtaagcgatcagcagcgcgacatggtgaatctcgcgcacgtcaccggcctcgacggccacggagatctgcgtacgggtgtggcggcgcagcaggtggtgctgcacggcggaagtcagcagcagggacgggatcggaccccacgtatggttggactcacggtcggagagcacgatgaagttcttgccgttggcgatggcctcgtcgatttcggcgaagatctcgtcaagtcgctcttcgagggccttgccgccgccggcgacctggtagaggcccttgaccacgtacgggcggtagtagccgccgaggatgcgggccttgtcaaggcgcttgagctgggccatctcatcagagttgaccacgggcagcgggatgaggatcttcttggcgtgcagctcggaatcggccagcaggttcggctcggggccgatggcggattcgagcgaggtgacgatctcctcacgctcccagtccagcggcgggttggtgacctgtgcgaacttctgggtgaagtagtcgaacagcatgcggctgcggctggaaagcgcaggcataggcgcatcgttacccatggaaccgagcggttccttgccggtgttggccatcggcgtgagcaggagcttcagatcctcttcggtgtagccgaaggcgcgctgacggcgctggacggactggccggagtggctgacgtgctcgcggcggggcaggtcgctcatttcaacggagttgccttccacccacttgcggtacgggtgctgggcagcgaggttcctcttgacctcttcatcgggaatgatgcggccttcggcggtgtcgaccaagaacatctcgccgggctcaagacgacccttggacacgatgtgttcctgcgcgatctccggcagaacgccggcctcggaggccagaacgatgtagccgtcatcggtgagctgccagcggccgggacggaagccgttgcggtcgagcagggcgccgacctgggtgccgtcggtgaagacgatgtcggccgggccatcccacggctcgataagcgtgttgttgtactcgtagaaggcgcgcacgtccggatcgagatccgggttcttctcccaagccggcggcagcatcatgcagatggcgtgcggcagggagcggccggcgaggtgcagcagttcgaggcactcgtcgaaggtgccggaatcggagtagcccggggtggtgatcggcagcagcggctcgaattcaccgagcagttcgctgctcaggcggccttcacgggcggagagccagttgcggttgccctggatggtgttgatctcgccattgtgggccagcagacggaacggctgggccagcggccagctcgggaaggtgttggtggagaagcgggagtggacgatggcgatggtggccttcatgcgctcgtcgttcagatcctcgaagaagtgggtgagctgcatggtggtgagcatgcccttgtacgtgatggtacgggcggacagggatgcgaagtagacgcccacctcatgctcgacgcgcttgcggatgcggaaggtcttgcgatccaagtccacgccggccagagcaccgtccggagaggcgaccacgagagtcttgaatcctggcatggcggcaagggcctgcaggccaaggccgtccgggttggtgggcaccacgcgccatgcgaggacttcgagtccctcctcgcgcacgatcttggcaatggcctgttcctgctgaccggaggtttcgatgtcgcggtcaaggaaggcgatgcctgccgcatagtgaccggcttccggcagttcggcgggcacggtggcacgcatgaactcatccggcatgctcatcagaatgccggcgccgtcacctgtgttctcctcggcacccacggcaccacggtgatcaaggttgaccagcacctcaatggcgtcggtgacgatcttgcgctcaggacgcttgttcaaagtggtgaccatacccacaccacaggcgtcatgctcgttggcgggatcatacataccgtccggagcgtggaccgtgagatcgagcggggctttgaatgtcaccgaaatcacctcaattggttgtgggcacgtaagaaaatcatgcctcttcgttcattgctgttgacacagtaccgttgctccatgtcatttacgtttcatgtgtccatataccgagtcgccataaaagtcaatagtgattctcaagcaattttttttatggccagttatgggggtatttcgaactttttcgctcgaaatgtctatttgaccacacgaaaatacgatacggaaacgtccgtatcgtgaaatgctgcgttgggtgatgttacggattggcggctgtggaccaccctcagtcatgcttcgcatgacagctcccgccagcgggagcatgagaactgtgcatgtctgacaccatagcgatcggcgcgctccgcgaactcaccgaacatggcatccacgtgcccgacgacgtacggctcatgggattcgacggtatccccttctccgcctgcaccaacccacccatcagcactgtggcgatggacgtccccgcaatggctcgtacggttatcgatcgcatggtgacgctgaacgagtcgaacctacggcatgaacggcccgatgacatcacccatgaccatatccagttccaggtgatgccacgcacgtcgactctggccgcctgataccggccggcacccttatgagtgccggccttcatccttgaaaatatgaaggctatgccacgtacagcgcggcgggatacgtaagatacgaaatctcatcgagctgatcgaccgtcacatatccggctggcgcgttgagcacgtccggaatgcggttgacgattgtggcgcacgtatgttcgacggtcgccggcttgaccacgtggaactccacgtccggttcaccctcgatcttccaatcgcacatatcgccatcatccggcccgtacaccttgccgatacaggcagtttccaacgtgatgccctgattagtttcggtggttaccacggcggacatgccgatgcatttgccgaccggaatcatctcgcccatcgtttcggaatacacgtcgacatcgctgaaatacggcacactggcctgggtctgcgatgcgatggtaagcccaagcttctgggccagcgcttcattggaattccatacatacgagggcaccacggtttcgggatgcgcaagctcggcctcgaactcctcggcggtcagaccgcaaccgtgcgctttggccaaagccaggccgtattcctcgacgttgtagctcaccgcaccggtgatcttcttgatgctgtggcatccggcggcgacggtggagaccatgttcacccagtagatgtcctgcatgccggagccgaccatggtggcaccggcttccttggcgatgatgtcgagacggttcgtggtggccggatcggtggtccacgggtagatgcattcctcgcaggtggcgatcacgctgatgccacgggccaagcactgctcgcacatggtggcgatttcgttctcgaagctgaatagcgtgactaccgcgatatccgcgtcgcactcgttgagtacagcctcggcatcggcgcgaatcggcacattgatggggccgatgcctgcaaacacaccggcatccatgcccacgacttccgggttcacgtcgatggcaccgacgatttgaatgcctttctcgtgcatatagcgaatcgtgtacttcgccattttgccgcagccgtattgaatggctttgattggttgcataccgcatactcctttgcaacagtgcatattggccattggagaagtctcgccgtcgaaaccaagccaatagtctttactctaccgacatcaggttgggcattcactgatatcggcggcactggagtgtcggggagagtcggtgtagcggtaccgctaccgagcagaagggctggggccagtacgagacctcccgccgaatcacggcatctcgctgattttctgcccgccgggcaggggcccatgcccatcggcgtatgcgccgctgatctggccgaatccaacgacccgagagaacgacgcgcaggggctcgaaacccttacagaactcatcacggcatacaacaaggaaatgagcaatgatttcccgcattgcaatccccagcggcgctcatccgtggaatatcgtatacatggtggccgagcgcattgccgaatcatgactgctcaccggcggtctcatggtgcagttgcacgccatcatgggcggtctcgacgtgcgtcccgctaccgacgcggatctgcttggcgcgttgattcttaagagcgccgcataccaagcagaccatgccggatatggagatagacatctgtacgatgccgcaatgctcgcatccctcatcaccgaccctgatgccgaaactcggcgactacatagccacacggatcgcagacgtatcaagctcccgtacgacatgctcaccgatgaatcaccttactggaacaaccttgacgaacaacatcgcagaacaggattcgatgccatagagacactggccgattggtagccgctctaccgaacccggctgtggcggataccagtcagaccaatcccgcctacaacctacttccggttacgtagggcgtggagcatggcgacgaacacgataacaatgaccacggccatgatcgcacagatgagtttgccggggatgcgttcgtcgcgggccgattgcatcacggcgtctgccgctgagatagtgcccgaggtctggggctgagtcttcagagttgccgattgttcaaaagtcatactctaacgataatgctacagaaagcggttaccataaagcgtgctcacagtcgcccgtcatgcggacttttcgaaaactgttgataaatagccattttccgcaaagccccttgcaaaacactatgatttagaatatctattagtatgacgtaaaccatattacaaactacttaaggtaagcgcttacagttcggcatgagagactcctcaccacgatatggatgcgctacagtcactatgattgatacgcacgccccatcgactacgcgatttcaccgtcgccgtacgcgcgttcggaagctcgcagacacggcttgccttgcaccacctcgacctgcgagggcggcgcgtcatcgccggcgcgcttggcctggatctgttcgaacagcattcggaaggaccgctcccccatgtccaggaagttctgggtgtaactggtcagcgccggattccacatggcaccgaagttgcggtcgtcaaagcctacgacgctcacgtcagcaggcacgcggcgaccaacctcccttagaccccggatcacagcgatggcagtctcgtcgttgccggcgaaaatcgcagtcacatcaccacgacggcccaaggtgcgtccagccttgaccgactcctccaaatcatcgtcgggcacgatgattgggtcaggtgccgtgacgccgcgctccttgagcgcgtcacgccacccattggtgcgggtgttatcggtcggaccttccggacgccccacatggaacacggtgcgatggccgagatccagcagatgcatggtcatccaacggccgccatccctttcggcgttgatgacttggtattcaccgtcgccgaagctgccacccaccacgaccatcggcatatctttgggaatgtattccagtgcggcgatgccggcccggtcgtactcgtagacgatcacgcccgccggcctgatcgacaaacccatgcgcacgcgagccttgacggagtccatgtcggactcgtccaaagaaacaatattgagcaggaaccgacgtttacgggcggcggcctccaccccatggttcgtttcggacgtggagaaggcggaaggattggccgcgaacaccaccacggagtccatctcccggttcgacagagcgcgcgccacaatgctcggctcgtagcccagctccttgatggccttggcgatgcgttcacgcttgtcttcggtgacgttgacggtgccgttgagataccgggagacggtcggtgccgagactccggccagtttggccacgtccttgatcaccggccgggtgcggcccgcacttctcgccatccttgtctcccctgttgttgtcagttgttgttattgcgtatgttagagaaccggcatcactatgacagccatccagtcacacccatatccgttcagccgcgctccgacttcggttctccgtttttcgccgcgattcattgtagttcatgacggggaacctatacccaaatcgataacttcgtgaaaaccgtacgctgagttgcggtgagtgtacggtttccgcgaaatcatccctaatttcgtgaagaacgtacactgaatcgtcgtcaacgtacggttttcacgaaatggggcctcatctcgtgaagaacgtacactgagtcattctgagcgtacggttttcacgaaatggcagctgatttcgtgaagaacgtacgctgaagatgcccccggtgtcactgatgactgttttcggtatggaaggcggcgcagcaaggtgtcctaggctaatatcgcctccgacaagaccgtcggcaaagccgtcgacgtcgattcaagttatccacagcaacaattcgcgtgacatagtatccacatttgccggttgagcttgtgcaacgatcaaaatcacccttagcgtcgagatatgaaagaacacaaggaagtttctgcactgctgcagcaggcgaagcaggagcgtcgctgctgctatggcaccagtgatgcgcaacggcgcgccctgaaacgtcgcctgcatgccggggagctggtgtcaccgtataagaacctgtacgccgaccgaacactttggaacaccatgaccagagagcaacagtcattgcaggtcatacgtgcgttgtccgcaatccaccctcagtgggtatttgcggggttgagtgcggcgtgcgtatacggactgcagcacaactattccctgcacgacggcacagtgcacatcgcctcgaagtccggcatcggcggcggagacgaggcgcgtctcaaccgcatctatatcaatcggattccgacgcggaagcataacggcattctcttgacgactccggcgcgaacgctgctcgactgcgcggcattcccattcccacaggcgctgcccatatacgattcggctctgagaaagtccctgacgaccatcgaagaggtgcagtcgctgatgattcaaagcgtctgcgacgaggtctccgtgaccaagctgctgaagtacgcggatcccctgagcgaaaacggcggcgaatcattgatgcgtggccagatcaccgaattgtctttcggcatccccctgctgcaggtgcagttcatgaatcccgacaatcccgcaatgtcatatcgcgtcgatttctgttggaagctcgcagacggccgcatcatcgtggcagaatacgacggcatggccaaatacgccgacatcagcaacaagaatcgcgcaagcctccaggcgaaaatggagtacgaccgcagacgtgatcggcatctccgggaacagggcgtcaccgaaatcgtccatgtgttctatgaggatctgctacgccccatcaatcttgagaccaagctgctcaaggccggtgtgcccaaaatccggtgaagataggccccatttcgtgaaaaccgtacgcccagaacgactcagcgtacgttcttcacgagatgagaccccatttcgtgaagaccgtacgcttacgacgactcagcgtacgatttccgcgacatgaggccatttcgtgaaaaccatgcgcccagaacaagaccgtcagaaagtcgactagacagcctcttaactaccgaatggtatctaaagaacggcgatattccgccagaaacgccgagagcggaatagtccccttgcgtttgtcatcggactgcgttattctgaaaccggtttcagaaagaaaccgataaacaaaactcaaagccacaaggttttgaccaacgaaaggaaacatgatgtctctcaaggattccatgattcgcggtctggctgtgtacggcctgagctccatgagccagtgcggtcgcgccaacagcagcacgctcgtcgacctgatcaacaaagccaacaagaacgctcgctgagccatcggctccggtccggtaatccaatcagattagccacggaccccataacaacaaagcttaaacaacaatcgcaaagccgctcacggcgatgcgcaaacgaaaggtaatgattatgtctctcaaggattccatgattcgcggtctcgccctctccggtatggatgccatcgcccgcgccggctacgccgactccaagatgttcgccgacatcatcaacgccgccaacaaggacgctcgctgaatctagcgaacaatcccgttcatgagattgcatgacacatacgaaggcaatccccctcaggccgcaatcggccggcacaccacaataattgaataacgcaataattcaacacagtaaaactgaacaataaccgggacaacggggtccatatattctttcttttcccatcgtgcgtacgccgcgccagcacaggttcacatacgatgcacacggccgccaatacacgatgcgtcatcatcaacgccctcaccgcatcatgagatactcccccgcccgttgtccacactgttgcctctacaatgcctgtgatgcacgccgaacggcatcctgcacagtgactgaagaacgaaacaccaagggacggaaatggataacgaactcttcgaaaaggctccgattccggaggcgtatttctcgctggcgatgcccgtggtgctcagcatgctggtcaccttggtgtacaacatggtcgacacctatttcatcgcgcatacgggaaacaccgatatggtggcgggcgtctccctcaccgcgccagtgttcaccgtgatgatcgccctcggcgacatcttcggcctcggcggcagttcggtcatctcgcgcttgttcggccaacaccggttcgccgatggcaagcgactcagcgcgttctgcttctatgccaccatcgccaccggcctgctgattctggtgctgggcctggcgttccgcgacccgatgctcgcgctgctcggcgccactgacgacacttggcagtatgcctccgacttctacacgctgatcatcgtcggctcgccgttcatcatcgtgtcgatgacgccgtccaacctgctgcgcaccgaaggccacgccgtgcagtccatgatcggttcggtggccggcacggcggtcaacatcgtgctcaatcccctgttcatccacggattcggctggggtgctgcgggttcggccggtgccaccgtgatcgccaacatctgcaccgacgcctatttcgtctggttcacgctgcgtcacagcagcaacctgtccatcgacccgcggaccgtcatcgaccgcgcgcgccggcgtctggcggtcacggcccgggaggtcgggagcatcctcgccatcggcatcccctcggcgatcacgaacctcacgcagagcgtcggcatcgtcatgatcaacctgttcctgctcccctacggtaccgacgcggtagccgcgatgggcatcgcgctgaaagtcatcatgatcgcggtgctggttttcgtgggattcgcgttcggcgcgcagccgctgatcggctacaactacggcgcccgcaatatgcctcgactgcgcggcattctgcgtttttcctacctgttcctgtccctgttcgccctggtgatgaccgtggtgctcagcctgtccgaccgtctactgatgggattcttcatcgaggacgccaccatcatcacgctgggcgccggcatgctgcgggttcagctgctgagcctggtgtgcgtagccgtcgtgatggtcacgacctgcaccttccagtccgcaggcaaggcggtcggcgcctttgtgctgtcgatcagcaggcagggtgtgatgctggcgattaccctgttcgtcggctcccggctggccggctatcagggtgtaatcgccgcgcaggccatcgccgatctgctgaccgcgattgtggcggtcatcctgttcgtcgtgatgttgcctgagctgcgcagtcggaaagctcgctgatagagcaacacgaggtttagcagacacgcattcggagagccaatacgctgcgtaatattgcgcgcgatattgcgcaatgggaggcggtgccgttttgttggactcatcgttgattccatcaccaccaatcatgtcacaagaccgagctcgcgtcgacgatccatgataccagttccacgatgccggtgtcgctatctttgcgatacacggcggtcagttcgccgcagctcacggtttccagtgtggcgcgcacgtcttcctttccggtactcgctcccgctgcgggagctgtctcgcatagcgagactgagggtggttctcagcgctgccccccagtcgggcgaagcccgccagcccccgccagcgggagcctgctcacagttgtagggttcgtacgatttgttcggtggtgcgggtcacgttggcggccgcatcggccaacagctcactaaggctggcggctccgggcgcgatgccgaataccgcgtcgatgccgacctcatgcagctcatcgatgccggtgccaatatgcccggctactgcgatgaccggcttgccgtggcgcttggcggtttcggccacgccggccggcgtcttgccgaacttggtctggaagtcgatggagccttcgccggtgaacaccacgtcagcccattgcgcggccgcatcgagtccggattgttcgatgacgatgacgatgcccgggcggaattcggcgtttaggaagcccttcagcgctgcaccgatgccaccggccgcgccggcacccggcacgtcgttcacggcaacgccgagctggctgtcgattacctgcgcaaaatgcgcgagggcggcgtccaatgtggcgacatcatctttggacgcacctttctgcgggccgaacacggcgctggcgccggtggggccggtcagcgggttggtcacgtcgcaggcggcggtgatggcgacgttcttgagagccgggtccatcgtgctgatatcgatggtggtcagattggcgagggccgctcccccgtgtgccaagtcgttaccgttcttgtccagaagacgaacgccgagggcctgcagaagtccggcaccggcgtcgttggtggcgctgccgccgagcccgacgatgatgcgcttggctccggaacggacggcggcgagcatgagttcgccggtgccgtaggaggaggcgatcaacgggttgcgttctttggcttcaagcagtgccagtccgctggcttcggctgtctcgaccacggcggtcgtgccgtcggcgagcagaccgaagtggccttcgacaggccggccgagcgggtcgtggaccggcacggcgcgcatcgatccgccggtggcgtcgacaagcgcgcgtgcggtgccttcaccgccgtcggccatgggaaggcaacggacctcggcatcgtggtcggcattctcaatcccctgagccatcgcccgggccgcctccatggcggtcaggctctctttgaaagagtcaggggcgcataagtatcgcgtcatgcttcgagcataccgcacgacacgacgaaacggtaaacgttttccgtaattcgcgtgattatttttttgttcagaattcaggctttccaatccacaatgctactattgcaagcaaaaatgcgatatcgttgcggtaaacgtttagacacgttttccgtttcagggaagaaaaggatcgattcgatcgtggctgtacagaacgataaggcgcaatcgccagcgacattgatggatgtcgccaaagaagcccaagtctccatcgccaccgcatcccgcgtgctcaacggcagcacccgcaaggtacgcaaccaatcgtatgtcaaggtgatggaagcagccaccaagctcaactatcgtcccaacgcctatgctcaggcagtggccaaaggcaccgcaccgaacatcgtgctgctggtctccgatatctccgatccctacttcgcatccgtatcgcaaggcgtggtcaaggcggcggccgaacgcggcatttccgtgaccatcggcgtggcagccaccccgcacgaagagttggaggcggtgcgtaagtccgtatccaccaggccgcgcggcatcatcatctccgaaagtgaatacaccgacgcgccggaacgccaggcgttgcagacggaactcacccagtacgaagcatccggcggacgtgccgtgttcgtgctcaaccgcaacctgcccttcccggccgtggacgtggcgaacgatgtcggcgcgcgcgccatcgcaaagctgatcgtcgattccgggtatacgcgccctgcgattctcaagggcgatgacgcacatcgctcctccaaagaacgactggccggcgtgatggaagtgttggacgaggcaggcatcaccgtggatccgaaagccgtggcgaatggtaagttcagccgtaccgacggctatgcggccgtcatgcaaatggcccgatccggactgctgaagccgggcgaaggcgcactgtacgacggcaaaggcatcgattcaatcatcgcgctcaacgacgtgatggtcatcggtgcgatgaccgcgttgcgcgccaacggcatcgagccgggtcgggaaatcggcgtcaccggtttcggcgacatcccctactccgccgacgtgtttccgccactgaccaccgtgcatctgccgctggccgaaatgggccaggccgccgtggacagcatcctgtccaaccgcgatgacggggaggccaccggcggcactgccaaccgcctgatctacgtgcaaagcgccccggacgtagtcctacgcggttccctcccccgccggtaaaacaaaaatagctccctctgacggtgtaaccacaactagcgaacaggtaatggcgactgccgcgcaccataccaccgactcatacaccgacgaaatcgaagaactgttcgattaccgagtcattgagcaaccggccacgacgagtgggcaccactcgatgattatcggatacggtaatcaggccttcgctgaccattggggcgagttggtcaagggaaacattacggagagtctggggcgtgctgctcatacccgcatcgttgatggcgcggttgatgcggtcgaggtcaaggccctcgtgcaggcgcagcccgagcatgatgagctcttcgaggttttcctcgggagtgatcgtctcgctatcggcccacggcacacggttctcgttgatggccgtgccccacaaacgcgggtgcgcgatgtcccagctgcgcagaccgtgtgagacagaaaccacccccagtccggcatccgccggacaacccccgccagcgggggcatgaatttcttgggagttgttcccatgcgcgttgatcatacctagttcggcgttggcctgtccatcagctgaggcagaggcaatggcttcggacttgctcccgccagcgggggctgtcagcgaagccgactgggggtggtcagcctcggtcaccgcgttgtagtgggagtgggcacctggccctagaccgacccaatcaacgttgcgccagtagccgaggttgtgctggctttcgtatccggggcgagcccagttggagacctcataccattcgaggccggcggcggcgaacaggtcgtcagcgatctcgtatttagcggcctcgtcatcgtcattgggcttgggcagagtgccggccgcgatttgacggcccattttcgtggtgggttccacggtcaatgcgtaggcggagatgtggtttacgccaagatcgatggcggtcgtgaccgaggtgcgccaatcgtcaaggctctcccccggagcgccgtaaatcagatccacgctggagcgcagcccagccttgttcgccgcattgacgcctacggccacgttggccggcgtatgcgtgcggtcgagggttttgagcacgtgcggcacggcagattgcatgccgaaggaaacacgggtgaagccgccggcagcgagctcattgatgtaatactcgttgaccgtgtccggattggcttcggtagtgatttccgcgtcgggcgcgatgctccagatcttgcggacggcatcgagcatggcgaccagatcgcgggcggcgagaattgtgggggtgccgccgccgaagaacacggtggaaaccggcggctcctcgatgccgtggtcgagctgccactgcttggtcaatttcatttcccgaatgaccatattggcatagttgccgcgcgaggcccccgcaccaagatccgtagccgtgtaggtgttgaagtcgcagtaaccgcagcgccgcaagcagaacgggacgtggatgtagacctcgaacactagccctcggtcttctgagcggcgcggatcttgtctttggtgtcgcggtcgttggagtcctcgccggtggacagggctgcgatgaacgcctcctgcggcacctccacatggccgagcatcttcatgcgcttcttgccagccttctgcttttcgagcaacttgcgcttacgggtgatgtcgccgccgtagcacttggcgagcacgtccttgcgtaacgcacgaatgttctcacgtgcgatgatgcgcgaaccaatcgcagcctgaatcggaatctcgaactgctgacgcggaatcagactacgcagtttcttggtcatcatcacaccgtacgaatacgccttatcgcggtgaacgatggcactgaacgcatcgaccttctcgccctgaataaggatgtccaccttgaccaaatcggcggactgctcgccatcctcatggtaatcaagggaagcgtagcccttggtgcgggacttgagctggtcgaagaagtcgaacacgatttccgccaacggaatgcggtagtgcatctcgacacgatcggtggagatgtactccatcgtgcccataatgccacggtggtcctggcacagatccatcaccgcaccgatgaattccttgggcgtgatgatgtcggcggcaaccatcggctcgacgatcttcttgattttgccgtccgggaattcgctcgggttggtcacatgatgctggctgccgtcctcggcggtcacgtcgtaggtgacgttcggggcggtctggatcaggtcgagtccgaactcgcgggagagtcgctcgttgacgatctccatgtgcagcagacccaggaagccgcagcggaagccgaagcctagggccacggaggtttccggcgtgtagatcagggcggcgtcgttgagcttgagcttgtcgagcgcatcacgcagttcggggaactgggcgttgtcgatcgggaacaaaccggcgtagaccatcggcttcgggtcgcggtagccaggcaacggctcggcagccgggcggacggccgaagtcagggtgtcgcccaccttggactgactcacatctttcgcaccggtgatgatgtagccgacctcgccggcaccgagcgccttggtgcgggtcatatcggggctgatcacgccgatttcgatgggatcgtgggtcatgccaatgcccatcatgtggaccttttcgcggtcgtgcagttcgccgtcctccatacggatgtaggtgacgatgccgcggtaggagtcgtagacggaatcgaagatcagcgcgcgggcgggggcatcggggtcgccgtgcggggcgggcacgtccatgacgatctggtcgagcaggtcggccacgccttcgccggttttgccggagacgcgcagcacgtcgctcggctcgcagccgatcagacctgcgatctcctcggcatgcttgtccggttctgcggacggcaggtcgattttgttgagcacggggatgatggccagatcatggtcgatggccatatacagattggacagggtctgcgcctcgatgccctgggtggcgtcgacgagcagcaccgcgccttcgcaggcggccagtgcgcgggacacctcataggtgaagtccacgtggccgggggtgtcgatcataccgagcgtgtattcggtgccgtcaaaggtccatggcacgcgcacggcctgggatttgatggtgatgccacgctcctgctcgatatccatacggtcgaggaagcgatcgcgcatctctcgctcgggcacaatgccgctcaactgcaggatgcggtcggccacggtcgacttgccgtggtcgatgtgtgcgatgatacagaagttgcgaatcaccgactgatccgtggaacccggctgattgtgttggacgaccaacgcattcctcctcttggcatatactcaaacttcacctagtgtagccgagggactgtattcggcgtggcattgcgcgggtttttccggggctcatgctatcctctaacttttgtatgtccttataacacacatcgtttggagtaaacgtggcaaacattaagtcgcagaagaagcgcgtgctcaccaatgagaaggcgcaccttcgcaacgtggctgtgaagtccggcctgaagaccgccatccgcgccacccgcgaagccatcgccgccggtgacaaggctgccgccgaggccgcctacaaggttgccgcccagaagctcgacaaggctgctggcgctggcgtgatccacaagaaccaggccgccaaccgcaagtccggcctcgctgttgcgatcaacgctctgtgagcataagcctcttaaggttttagaaagtcccgcaagtcatctggcttgcgggactttttgtatctccgttcaaagaggtacattggcggtcttgcgaaatgacatctccgttcagagaggtaccgaatacgggaaaaaccaactataaacgccatcattgcaacacttatactcagcgtttcgtgcttcaggtacctctttgaaagcagttagcattctgcagaaggccagatgtacctctttgaagacagttagccctgaggcggccttgaaccatcctgaggcttgtcttcttcgtccttggtggtatcgccgggatcgacggtatcggcgtgcggatggatgaccgggcgcttgagatatcggctttcgctgggcaggtagacgcgatgacgttcgacggctccgggcagagtgacgttgaagcctaccgagagcagtcgcagcgccaccacgatgatgacgatcagcacgtcgagcagcatttccgagcgcatgtcgaaccagccgtagcttacgccgcgccataccagcacggtcaggatgcagccgatgaacgaaggcacagcatagaggtgtttgtctcgaataatcattggcacgtcgccaatgaagatgtcacgaatgaggccgccggccagtgctgtgaacatgccaaggaatacggctgtcatgcctgaggaaccgtaggccagagcttttgcggtgccgctgactgcgaatagtccgaggcccagagcatcgatgacagtcatcgtccatttgagtttggtgatctccggatgggccaccaccacgataatgccggaaaacagcgtggtgagcacatagcctttgtcggtgatgccgaccggcggcagggcaccgagcatcacgtcgcgcacaagaccgccgccgagtgcggtaagccatccgcacagcatgatggtgaagatgtcgtagcccttgcgaatggcggcaagtccgcccgataatccccaacacaggattgctaaatactcgatgaccacaaaaacgatgttgttctccaacgccacctgcatgagccactcccctctggtaccgcttcggttcgtctcagtccgtcttcgttctgttcccgttcatccttattcggcgctacagcccgtcgtacccgagcctacaacaggccttgcctgagtagtatggccggggaggaaggggccactaagacgtgaataggatggcaatgacgccagcttgccggtagtcgttggcaactcagcacctctaggttttacgatccgtgatcaaaaaacatgtatggacttaatcgttgttgatttctgattcaatcaaggcgactttttcttcgacatcacgcaagcgattgcgcagtgcggactcgatatcgatgccgtcaacgcgggccttgcgcacgacggcgaggatttcatcggcgtaggcatcggccttctcccgttcagcggaattgtcgccgcttgattcggattggttcgccgcttgaggatgtacatcatctcgctgagcatcagccgcagccgactcatcaaacgccgcgaacaatctatcagcattcggcgatttggagatacgagaaacgactttggccgcgcgaggcaacgcaccttgaacgcgggaaatgccctcaagcacggatttacgatgcttttcctgctgtttcatcttttcccatagagccagcacagcttccggggattcgggttgggcagcttctcccccgttgttactgtcagcatcaaaagcatcagaagaatcagaggaattgccggcatcatcagccgcaaacacatgcggatgccgagtgatgagcttgttcaccaaccgatcggcgacctcatcaataccgaacgggtcctcagtatccgattcgcagacccgcgcctgaaacacggattgcagcaacacatcacccagttcctcgcgcatgttgtcacggtcgtgagtctccaccgcgtcgacgtattcgtaggtttcctcgagcagattcttgagcagcgacttgttcgtctgcttgccgtcccacgggcagccgcccggcgaatacagcacatccaccacggccttgacccggtccagcgccgtcgctgcctcagccaccggcttcaatttcgagcagtgttcgaagcctgacggcaaacggtaggctgaagcatggtattccgtcatgtcactcatcttgctcataggtttgctcctgttctcatctggatgaaccataaccaccccccgcaacgtgcagaagacctagatcatattatttgttgcggaatgttgctaaatccatctgtatctctctagccaagaacatttccaatacgccaagaccccttggaattgttgctgttccaaggggtcttagtcagaaacaaaaggtgctagttcagcacaccttccacatccagtaacgtataatgaaatcaacggctcccacggaaagaacggcggaattccaacgatttgatacgattggtataccattggaataccattcgccacggattgtttgttggagaatgttggagaatgaaggatgctgaatgcctaggataaggaaaaccggagcggtctaccccatccgccacgagcagcggaaaacactcaaggacggcacggtaaagacatacgtgaactggcaggccaaggtggacggccgatgggtgtccgccaagacctacaaggaatgcgacaggaagatagccgaagccctcaaggagaaaaccgaatggggcatgggcgtagaccgcgccacccggctcggcgagtacgcggaacgctggttcgagctgaaacgacgcgacctgaaacccaagtccatcaacaactatgcgagcctcataagcgtgcacctgtgcaagtacgcgaacgagaagctgggcgaagtgaccgcctcggcggtgcagcgcatgatagccaacatgcgcaacctcgacggcaccccatgctcgtacaaccggcagcttggcttctacaacatccttaaccagatattcaaggcggcggtggccgaccggctgatacccaccagtccggtcaccagcgcggcaaggccgaaacgcagggacacgggattggccggggaccggcgcaccatcaacgggcccgtggccgtgtcggcggacaggcgcagcggcacgcaggaccgcaaggcgttcaccgtggagcagatgcaggacatgctcgaagcgtcctccgacgacctgtttctgggggcacgccaatggtggcgtctgctcaccggcatgaggcagggggagatactgggagccacgttggacgatctcgacctgtggcgggacaagacgttggaaaccccggacagcggcgagatatggataggcacctacacggtgaactggaaactggaaagcctcgacaaggagcatgggtgtggggagcccggcagggacggaagatacccgtgcggcttcaaacggccttcgagctgcccccgataccggtggagggtgccggacggatacgacatgatacacctgtgcaaggggtacgctttgacgccgccgaagtccgcgagaggcaaggtcgtgccgataatcccccagttgggcaccgtcgtgcaccggtatctggaggccacggagaatatcatcccgaacccgtacaacctgatattcaggacgcgcgagggtatgccgttggccgcgttggatgacagggccggtttccgcgacctcatgcgcagggcgggcatacccgactacgagaaccggtacgggcatgaatgccgcaactccgtcgtatcgctcctgttccacatgaaggttgaccccggcatcatccaacgcatcgtcggccattcgagcatagccatgagcgagcattaccgcaccgtgccggtggaggatttgatgcgcggcatggagacgataggcgacgggctcgatttgaagcagatcgaatggaaggcctgaccatatcggtgagcccaacaaaatggtcccgtcctccgatacaggagaacgggaccaatcacacttcacttagtcgagatcattggtactggcgcagaagtcagaatcaccaccaagggaacgacagataccatacccggcacggttattggcatcctctgttttcttgtagtctctgtaggctatcacgccaacgacaagagcaatgatgaccagaatggcaatgattgctgccttgacattgttgtcgtgatgtttctcttctttacgcttattctctgcctgctcctcttcatgacgaagattctgctgctcctgaagttccaccaaccgtttctgcgtctccagtaactgacgttgcagttcctcctgcgtcattccaggtttcggctcgtcgggtttcagcgtcggccgttgtggcgctggtggttgttctggttcactcattttttgtctcttctctccattggggttggtgagctaattgtatccacgaaccgtgttccctgattgcaagaaacacggataaggtacataatcatgcggcccgtgcggcaagattgtcatgcaaccatcgccggtagtccaacaggacgccgacggtgatgcccagttcctgcgccatcgcgtagggttctcccccgtacaggtcttccgtgcgcatgtattcgatgggattaatcagagagaacgcggtctccttgcgggtgaggcgttcttctttctcccggctcagtaatccgagcccgtcatcgaagtgttttgcgtggataagctcatgctgcaacgtgcatacccgttgttccatgctcatggtggggtcgatgtacgcggtgcgggtatcgggatcgtattccccgcactgcgtcccgtcgaactccttatcctctatgaggactcccatgtgtcgggcctcaatggtgaggtcagtccatgttttcacgcccggactccgcctgcttgttctcatcccgataagcggccttctccacctgtatcttcttgcctatgaccttttcgagctgggacgccaccgaggctgtctcggataccggctggcgcaatgtttccttggtgaggcgagccagttcgatcatcagcgaacggccggtggtgcccgacaatgcggcaagagcatctacgtcgttggtgtcgatggcccttttgccgttgaccctttcgctgacatacgcttcggtgaaaccgaggtattcagcaatctgacgctgctttaccttgtgcgccttcatgtactttttatactccgtcgcaaatgccaaggcgaacgcagacatttcgcggaaatcatttggattagccatacttaaatcttagcatatgcgatacggcgtgtctagtcttgacagaaacttggcatatgctaagttaatagacatgagcagcacacagaaactaacaacagccggtattcgataccgactcttcatcgcacagaaaagcctccgatggcttgcagcgaaactcggatgggatgtaagcaaactatcccgccgactcgccggccagccggccttcaaagtcgatgaattggacatgatctgcgaagcgctcggagtcagtttcgaggaactgctcaccatcccagtggacatgcatgagaagttcttcggcactgggacgcctgacttggaggtaacagcatgagtgtctatcagaccccaacttggactcgccgccacgcgagactgactggctccccccagtcagacccacgtagcgacatgaacgccagccgcctcacgaacgggtttgctgcaactgagattgcagcacggcgttttcacgagagatatggacgattgcagccgcgagattcgctagaccgtacgccatcttccgctgagctgggtcagctgacagccttgctgctgcattgaaatcatcgcaagcggaacttgcatagttctccgcttcactagccataaaaatcacctcctctccgaatcgagaaaacaatgcttagtcagaatcgtaacctctcccagaagctcgttgtggaggaacgtcgcacccgtgaatacttcaccggcaacgtcaccgaagatggtctaatcaacgcggaaatcgacaccgattacggtgcccgtcccctcactccaagtcaagcgcgtttcgccgccaaggcccttgaagacctggccgactgcgccgacgagaagaacgaggaataacaagtcttgccgcagtgggtcgttttttatccacctatcgactacaggcaaataaataccatactgcgatctgctgcggcaaccatcggccggaacccttcggggtgtctggacacgcaccatcgtcaccacaccataggactcgtcatccatctctcagaaaccagaaacacggtggcggcaagggcgttctcggttcgaatccgagtccggccacgaggaaaggacatgtcatgaacaggaaaacgtatggggctcactgctccggctggcagcattcacctgatgaacgccggcaccggcatgagaacacgaagacaatcacttgtctgacgttggcggcgacagggttcctgattctctcactgcaaccctatgcgggcccgtggagtattctcgcaggcttcatgtgctgttcgcccgtcatgctctcgttcgcattgtcgaaaggaacacaaaaatgatctggttcatactcgccgtaatactcctgctcatcggagtcggcatgatagccgtcgcactcgccaacggtggcgacggagccggtttcggcttcattcccatcatcgtcgccgcactgttgatgattccggcatgcctatactcgctggacgtaggcgaggtggccgtcatccgcaacatgggcggctccgtcgccggtcatgcggagaacgcgggcttccatgcgaaggcgccgtggcagtcggtcatcaaatacgatacgcgcaacaacctcatcaacttcttcaaggacaccgactacaagtacgacggcggcagcgcggaaggcaaggagatcacggtcaacgaccgtagcggtgccagcgcgaacatcgacattcaggtcaactattcgctcgaaccgtccgccgccgaaatgctctactcggaatacggcaagcagaccacgttcacgcagaactacatcggcaacgacctgcgcagcgtggcccgtgaaacctccggcaagttcgacacgatcacgatgctcaccgaccgtggcaagtacacgaaggccgtgcaggacgcgctcacctcgaaatggaagagcatcggcctgaccgtcgaacaggtgtccgtgcaagacatccgctacccgaagtccattaccgacagctacgcgcaagcccaagccgccgaggtcgccaagcagaaggcgaagaacgagcaggagaccgcgaaggtcgaggccgagacgaagcgcatcaaggcgcagggcgaggccgacgcgaacaaggtgctgaacgattccctgaccgacaacgtgctccggcagcattacatcgacgctttgaagaacgccgaccagctgatcgtcacacccgagggctccaacaccctcatccaacccaaatgattcttccgggcggggttctttattcctttacttcctcgtccggtggcagccaagcgcatggtgccgcacctacgaagccttccaatggtcatggacttctccaaggtgcaccgggttcgactcccggcttggcgctcagaaaaatttaaccccttcgcgtcctgcgtcgaaaccagcaaaacaagggtttcggacgtgtcagcaccggcgcagaaggacaaccaaataatcaagcccagtgaagggaaacaatcatggaactcaccccattcgaccgtatgagactactcaacgaggcgcgtggactattgccgcaggacgagcttgaacgtcgggcacgcctgattctcgacgatccagccgctccttccaagacatcgaaggaacctgactcgcctcgtctcatcatcagcgacttcctacgctcgaaaggattcgagccgatgaagaaaaacgccctgcatttcggctcccgtcttgccgagaactacaagatgaagttcggctcctacccgccgaagcacgggaagacctacatctactacgagatcgaccggcctctcatggaggaaacgtgggctcagattcagacggaggacgccgactgatggcatctgatttcaactccatcgccaaagccatccgttatctcggtgattgcgtccgttatctcgctgacaagtatgtggccgtgaacgatcgcgtgtactcggattggaacgaggcgtcgaaggtcgtgggggatgttggccgtgaccatgtggccgattatgcggaggcctctcataagcagggcaagtcgcgtacttggcgtcacagtcacctgatggagcgtgaagaacaactgtccatgcagtcgaggggttctcatgttgaccccgaatgatgtccggcatagaaagttccgcacgtatcgttccctgctttacggagaggtctacgacgtggaggacgttgacgattttctcgactcggtggccgacaccatcaaggttttaggcaaggaagcactcaaagcaagaaaggagtggcaatgaccgtcgagcagatggccgatgacgattacttcgcgtttgacgcggtggaccagaccgcgttgaagaagtatctggtcagcccgttggcgtattcgcagtatctgaccggcgagcattcgtcctccccccagttcgagttcgggaaggcggctcacagtctcatattgggcagtggccccgaggtgctggtgaaaccgaacctacgcaccaaggaaggcaaagccaggtatgcggagacattgaaactgcatgagggcgaggatatcgtatggctttcccccgatgatgtggagaaggtcgaggccatgcgagacatggttggagatttcttcacgaagctggatggtcagccggaggtggcgatgatcgccgccgaccctgataccggattgttgattaagggcaaggcggactggttgccgtccactcccgacccggatggtgtgctgcgtatccgtgattacaagaccacggtgaagtcgccggacgagttcgagcgttcctgctggcagtacgggtatcacattcaggccgcgttctacatgcgtctctaccggttgacgatgcccgaatataaggggccgttgggtttcgagttcgtcgtgcaggagaagaacccgccgttcgactggatgcgctacgagattcaggaggattcgcccatcatcaccgaactggcggaaccgaagataaaccacgccttgcagggcatcagatggttccgtgacaacacggaggacccgttggaggccatgagggcctacgggttgcctaaatacccgaaggatgtcgtgttccccgactggaagctgttggaggaagaggaggagattgaatcatggcggtaattaagaaggacgctcagggcggtcgtggcacgtatgcgaccctggctcaggtcgtgaactatgtggacgagcaggggttcgacctgcaatggccgacccagttgattgacggacgcctgtatgtggatacggccgtcaggaagaagggcacggacaagtggattgccagtaattgtcttatcccggtcgaggtgggtgattcgcgtggcatgagcgtcatgcaggccctcggttccgcattgacgtatgcgcgacgctacagcacttgcggcgcgttcggactggcgaccacggatgatgacggtgagacgagcggctacaagaagcgttctgtcaagggtatgaccgacgagcagaaaacacagatcgaccggattcttgaagactgcaagattccggtgggtcaggagaacggtttcatcggcaatgtcctgcaaacgcgggtcgcttatggcacgttgaccgaatatcaggcgcaacggttcatcgacgcttaccgacagcacaacgacaaggttaaggaggctcccagtgagcagtgagattggtttgaacgacgtgaaaccgggcatgtgggttgagttcgatgatgattacgggcattatgcgggcgaactgcatgagatgaagaagccagaaaatctggtggacgttttcgtcatgcttctgggtaataagccgccactgtacatcgagaccgaggatgaaggcaatctcgtggttttcttggattttggcgatgggtacagtaccggttccgcccggaacgtgcatgtgtatgagtcgaagcccgagacggaatccgtcaagcaggctgaagatgatgacaagaaaccgttctggaaaggcaagacctgcggggagatggcacacctgcacgtcaaggtcacatacaagaacggggacgtagtgaccggagtgacgaacgagatcggtgatatcgataacgcttactgcctcagcgcagatttttcccccgatgaagagttcttcccggacgaacgcttcatcgagtccatcgaactggtggatgatgtcccgtgcacggatgatgccccgcgtgagcgtatcaccgatatcacgaaggttcgtcccggagacaaggcggtgatgaagaacggcaacaagtacacggtggcgcaggtgcgttctgagtgtacggacggcataactctgtgcctgcgtgtcgaggggttctgtgttgtgtgcgattggtgggcggaggactacgccttccagtatgcgtatcacgaaccgtacacgatggccgaccttccgaaggagccgggattctacaaggctcgcaccgaatcggtgtggaagcatgacggcaaacgttggatgccggtgctcgcccatgatggcaccatcgcccccgccttcccatgccagtcccaatcccgcagccagttcttcaagaccagtgtccgggatggtcgcttcccgttcacgaaggtggaggcgagcttcgagtgactttcaccccgaggccgggctgcaagtgcgccagatgcctgtgggttcacggggacaagatcacgctcccccaatgccccacatgcggtgccgttgattgcgccggagcccaatcacacatgctggtctgcaacaagcgggccatagagaaacacaagacgaacaattacaggaggaatgcgtaatggccggagaaccaagcatcgagcttaccggatatgcgggagagatcaaggattttcaggattccagtattctcaacgtcagcgtccatccgggttacacggataagaacacgaaccagtgggttgacaaggagcctcagttctatggcgtgcgtcctttgtcgaatcaggcgaaggatgctttgaatcaggttcgccagttgaagtcccagccgaacatgagcgtgaaggttcttgtgaacggcagcttgtccaaaagggtgtcggagaaggatgggaaacggtatgagaattgggatgtcgcggcccgcaccattgcggtgttgagcgcgaaacccaaggcccagcagtctggtttccaacagtcgcagcagcagtatcagcaaggcttccagcagccgcaacagggcttccagcaaccgcaacagcagtatcagcagcctgcggacccgtggagccaaccccaggacgaatacgggaatgggcagatctaacccgtcccaacacgtcaaggatttggtggacgcacgtgaccaataccggtgcgtccgctgcggcaaaccattccattggagcggtttcagccggcatcatcgcagactccggtcacacaagtggccgggactgcatgaggcgtcgaacctcatcttggcgtgtgggagtggcgatacgggatgtcatgggtggattcacgcccatccgcgtgaggccatgagcttggggtatatcgtgagcggtttcaacgatcaccccgaactggtgccgattctcaccgcccaacatggttgggtgcttctggacgataagggaggttggacgcgatgcgaaccgccgaagcagtaagcctgttgttcatcctgttctgccgtgacccgcagtttcggcgggcgttgtacaagctcgaccctgtgttgttccgcaggttcactaatgggtaggtgtggctgtgaacgttgatgacatgaccgatgaggagttcatcgactattgccggaacggcggcgaactgtccggcctgataactgaacgtcatccgaaatgcgattggtgcggtggcatgtgccgggtcggcaaggatggcatgtgccggaactgtcgtgtcagggaacggcgtcgaaccgaccccgagtatgcgcagcatctgcgtgatctggcgaatcggcggaacgctcgtaatcgtgagaaacgtaatgagtatgcacgccggtaccggtcggagcatttggctcaggctcgggcttcggctcgtaagtatgccgccgcccatcagcgtgagatggctgaataccatcgccgttggaggtcggagcatcccgagaaatacgcccagtatgaggcgaagcggaaacgtaaacgacaactagccaaggaggctgtcaatgagtgagaaaccattctgggcaggtaagacccttatggagattcagaatctcgataagcgagtcaaggtgacaatggagaacggagacgtattcatagggaagctcgtgcggcgttccagagacacggacggtatatgtagcctttcgatgcaactcgacgcgcatcgaacatatttacacgtgttctcggctgaatcatctgatacgcagcccatcattcccagttacgtcgataccgtcgaattgttggatgaccccaactacgagcgtatcgaggaggctgatgacctccaagagaaagatattgccgttatgctcgacggcaaccgctacaaggtcacagatgtggaaaaaggccgtaaccgattctggggtcgggtatacggcgctgtcgggccggaatgtatcgcccttggcttcaacgccttcacctacggactccgtccgaagccccggcttcctgacaagcctggactgtggttggacaaggacgataacacatgggtgatgggcgagaatgcctttccactcacgtgtattgatgccggtaattggagtatcacgcgcccgcagttctcaacggatagcgttcaggttctaaatgctgcaccgttccgattagctaaggcggtggaagcatgaacatcgaggtgggccaaaaataccgaaacaaccaggatgctgaattaatcatcatagccaaggtggcttgctttacctcctcccgatctggcatgtatctaggtgtagacgtgctaccgggagcagaactgttcgtcgcggacgacccatacggcacaggctctgacgtgattgttaacgagcagtctctgaccgaatgcggatacaaggcggtggaagcatgaacatccacccgatcattgatgaacctccatcgtttccgcaaactgtcttacgcctgctcacaggaagcactcattgctgtgactggtgcgagaaacgctggatcaaggttcaccgcactggccaattggaatgccgaaaccgtcgatgtccctactgcgggcaatacggatgcccccgagccgaaaaacactggaagaaatgccccgtgtggaatcccatgaccccgcctgcatggctataccccgtgttgaatcggctctgcgaaagagatctgcaacgaatggcgaagaaatcgaggaatgatgcgtttccacaggattagcccgtgtcccaaatgcgggggcaaggtcaaggcgaaatgggagcgagtggcccgaccgtttgcccactcgtactggcgtctgattttccagtgcgcgcattgccggcagcggtgccgcatgttatgggacattgcgccatacaaaggcaactgctatctgaatgcaatccgttgttggaacgcgatgtgcaacggagaccggaaatacaagctgattcgcgagagtctgggaggcagacgatgagagacaaggcgatgccgttgggcaagaagttcaaggtccggttgaccatcacaccggaggaaaccggaacgcccgtggacatgctgggattcacattcaccagcggccggaacgggcgtatggaactggacacagagtacaacaacattcccaaactggctgatgacgggctcgactcactgtcgattctcgtgatcctcaaaacactggagatgtgggcccagaagggatatgagctgtgccagcccatcgttcaacgatttcacggagacggacgatgaaggcgacgagggggacggacgtggagatcgaacgacggtgcggcatggtcacaggtgcctcctgcgggaatgtgaccctgagctggattcccggagacggccgaaacggcacccgctcatgggtgctggccactcatgctggcgacagcatccgccgcatccggttgagcaggaacgagctcggcgacctggaggccatcctccaatcgatcgcgaacgagaagaaggaactgagaggcagacgatgagcactctggatattttgggcaacacgagcgagcaggcggattcgatacgtctgatgctcaaagtgcggggcatgaaggacggtcgtttcatcgacgccgacccgctcatcatcctcaaggccgacaatcatcaaggctccgacaggtgggacgtgtatgtcagcaagacggtgtatccgaccgccgaatcgtatggcacgctcgccggcatactgcgaatgctcgccaatgacgtggaaatcatggcacacgagaaggaaatgggaggcagacgatgaacggtgacgtgactgccatggacatcaattgcgcactcgcctcccgttaccggcgtgacggtgacgggtattggtcggagatttcggtcactgagccgaataacacggtgctgcgtctggacggcgtggcgttggaggtcaactggcgcggggacacatggatcagcggattcgaggtcaaggtgagtcgcggcgatttcctccgcgacgcgaaatacctgtgctacaagaagtacgtggacgatctcaccctcgtctgccccgcccgcatgatcgaccgcagcgaggtgcccgagccggttggcctcatgtactacgacccgtccaaacgcacgttgagataccggcgcaaacccaacccaagtcatggtgacacccggcaggtcgaacaccggctgctgaaaaaggtcgccgccagcgaacggccggaccggtacgggcattacgagaccgccgccgagtatgtcgcacagcgagaggcgatgaaaggcataggccgtgcgctcgggacgaagatggcgttgcggctccaacagctcgaacagttgcaggaacccaccgaggcacgacgtatacaggcacagtccaaggcgttcgaacgggtgtgcgacatcctcagccgccacggctaccagatcagccggtggacccgcaccgaggatcttgagaccagactgaaggaactggacgaggcgctttcgagcgtggtgcccaccggcagggtggaccgcgagaccctgtacgccatcagctgcctgcaacagttgagaacgactctgggactccaagaccgaaaggagcacggacgatgagctataaggcgaggatattcacccgtgaggagtttcgagaggtcgtcgcagccgccatctacgactacgaacaagcgcccgcgaaatgcctctacacgaccaaggatgcggcagaccaactctacggcgagtacggcgaggaaaccgaggtggaggaatgaaaccacgagtgtatgacgatttggtccaatccgccgtcgaattgagttgcttcggtacaggccagtcaaccatcgaggaaggccgagccgcctatcaagcatggctcaaggagcatgaccggcagatagccgaaaaagcatgggaagaagggtatatccaagccgtcaagaacatgaatcccatgcccggcgaggaatcgaccgaatacacgccaaacccatatcgaaaggagaacgcatgaacgagattcagcttacagaccatttggtcgcgcatatcagcgcgggaagcgactacggccgttatcaagccaaaatctgcgaagacggcaacttcagagacttcctgtacgccatgagcctcaaacgtctcaagcgcaaatgcgaaaagtatgcgaaacgtgaacgcaaggccatcgcatatgtcgccacgctcaaggaggaatcatgagcgtaagtagtctcaaaacgcgaagaaggaattgaattgagcggctggcgtgacaaggccgcgtgccgtgacatggaccctgacctgttcttccccaccacgtccagcgaggaacgattggcgctcaaggcctgcgcccaatgtccggtgatatgcgaatgcgcacggtacgcggcgcaacacgacagaatcagcggctacccattgcaaggcgtatggggtggcgtgaacaggagcagaagaaggaatcgaaatgagtgacaaggatatggtcacggtttacgaacgacgtgacggcagcaaacccggattatggtccgtgtaccggtatttggggtgggacgtgttttgctcgttctccctcgcggtgggcatcacgtcaaagaatacgatgatggccattgttcaagcgttttgtctgctggtttttcttggactcaccgtctggcagttgaaccatctgacttggagcatcaccgactaccgggtgcgggtcggcaccaacttggcgaaggaggctcatgttgagcaaagcggcaagtagagcatggcagatgctcattgaagactcgaaccgtccggcagaggagattcgcttggctaccggacttcgggtcgatgtgatcgagcagatgcgcggggacgtgcaaaaacgactacgagacaacccggagttctgattatgagaccgagttatctgcccgtccagtatgagcattgcccgtactgcggaggaatcttgaacgtattcggggactgcgtggactgccagtttcacgatgacccgactgaatggtggatggacgaatgagccgacagaaagccaaaggcacactgcttgaatccaaggtggtcaactatttgcgcgcccggttgggtgacagcgagcagacgatacaccgtgaagtgttgcatgggacgaaagaccagggcgatatcaccggtctgcgtatccacggccagccggtcgtattggagtgtaaaaactacagcacctatacggggagactcaaggagtggatgcaggagggccgtaccgaggcgggtaacgctgacgcaccttactggttcgtcgtgttcaaacagaagggtctcggcttgaacacgttgtcaagcatggacaaccagcccgtgctcaccgacttaaagaccctcgcattgatagcaggacatggaatcatcgaaggagacgaagaatgagctacgacctgttcatagtggacaaggatgtgccggaaccggaatggtttgacgtatgcgaacgggacggcgagcatgtgcggaccgctcatggccattatttcaactacacgtataatctatccgcgtttttcaccgattacaaggtccatcctaagcatgacctggacgggttgacggccggagaggccgcagcccgtatcgacaaggcgttgaaagacatctacttggaaccattgtatgttttgcgcggcaaatacaatccgccgaactattggggcagcgtggacagcgccatcgcatggttgaaactgatatacgactattgccgggaacacccggactatatcgtgagggaacgctcctaaggggaaatgatggaagataggaaactcgttgatttcgcccgttggctgaacgatcatccgggcgaatggaatctttggccgtatctcattcccatacaggccgaccgcagggataccgtcgcatcgatgaggcttgtcatggaacgcatcataaaccatcagtacgacgagttccgcgtggacaccgccctgctcgaatacgaactgttcaacggtttcatgggcttcgacaacggtggcgtgcatgagaatggtctcgcgttgaagatgaggctcaaagcatgaccgcgcgtggagatgaccgcaaactcatgcattggatagcctcgcacggctacacggtggtacgcgccggcagcggccactggaagatattcgatgacggcgtgctgctcacggcgacgagcggcacgccatcggactggcgaagccgccacaacttcatcaagacgttaaggaaacgatcatggcagatgcagtgaacccggactattacgagaacggcccgttcgaatgcatcctattggccgaacaatacagtttcaacgtgggcaacatgatcaaatacgtgtggcgccacaaggacaaggggcatcccaaggaggacttacagaaggccctatggtacgcacagagagcgaaagccaacggagagagcttcgccgcatacccttggcacgcagacagttgtctaaccgactacatccgctccccctacgattgggtgactctgattcacctgaaagccaatgcgactatcggcgtggaacatgatttctgggacagtatggccgaagcccatgatgagaatgccatccactcactacgtcaactgttgaaggagacggaatgagtccggtgggtctggcgcatttcatcgaactggtcgtgctcttcatcatcgggatacaggtgttccgctacctattcaggaatggggcatatccctattcgatgaagtcgccgacgtgatgataatcattgctttctcctttggattgatagcggcttccgcaacgtatggcgtctgctggacgttcatgcaaatggtgttccccgattacacgtactggctgataggagcaacgaaatgagaataagatcaatcaagcctgatatttggcgcagcgatgacttcaccagccttgacgatttcggccagttgatgttcattgggctgatgaactacgtcgatgacaacggagtgggcaaatacaatgttgtcgatttcgccgccgacgtgttcgcttcgcacctcgccagcgacgcttacggaactttacagaaaattacggaagttttcggaagcctttccgagcggggtatggtgcagatttacaccgccaaaatatcaggcaaagacgttaatcttgtctatttaacgaattgggacaagcaccagcaaatcagccacccgatgaaacctcgttttccgcgtcctgatgccgattccaggcccttgctgaagattgcggaaaattgcggtaatcttccgaaaacttccgcccggaacagaggaacagaggaacagatataccccctgtagtcccccaggagggggacggcgaagaaaacatacaggccgacgagattcacgttgaggccgatgccgagttcaaacagttctgggaggtctatccgaatcatgactacgaggaagccgccatcagggttttcagaaaagtcaggcacaggcgacaagaccggccatcgctcacggccctcatagccggcgcgcaaatgctggctaattccggtaccgagccgcagttcattccgcaagccgcacgttggctgcgcgatgggggctggaagaacaaacccaagccgcctaggcgggcggagctgccgccagtcacgagcaacgcgatgtataacgctggtttcattcacgacctcggacaacagcccacgcaagatgatctacaaatcgaaggaatcgaatgagtctcactttgcaggaagccgccttggtgatggcgaaaatcaacacccatcatggcaacgcacgattggacaagctctcggtcgaatcgttccacgaggagcttcgcgcggacgtgacattggccgagtgcatggaggccgttaaacgcttctacgccgacaacgattcaggccgttggatgggctctggcgatgtgaacgcgatgattcgccaattgcgcaataaggcgaagccctcggaggcggagatcgcgcgtgagtgcgatgcgcggggcttggagggtgacgcggcgtggctgtaccggcgtcaacgcatgttgggccgtcaacccgaggaggcggctcgaatcacggcctcgagtcgcaacccgttggagttggagccggcgaagccgaagcggcgtacaccggtacggcatttcctcggcgcgggcgacttggggttgggtgacatactgccgcgacacgccgaaccacatttggaaaactagagacgcccgtgcattattggttttgctgacacgtccgaagctcttaatgagtgaaggtctaggtcagtttgtctttttcccctgaaaacacgaggctctgccgctaccacggttgctggcgggatatcgtcaccgacgcgccgtcaccgcttatcggacatggcgtcgaaccgaatctgaatctcctgtgcgacaagcacgccagccagttgaccggcgacctgcgatggttggaccgcagtctgcccgacctgtgcgagtatcgcatcaaccgcgcctacgggcacaagaacggtggcggcggtcaatccggcaccgctcccgcaccgttacgcgaagccctgcatgatctgctgtacgcggacgatgaccacggttatccggggttgcaaggcacgttgtacgagtggatgcgcagtctgaaaatcaatctgcccgagtccacgccactgtcggacatggttcaccgtatcgccaatcatccgaaactcatggagcattccagcacccccgtgtacgcggaactggttcacagtctgacacgcaagctgcgtcgtttcctcacggacgatgacggggaaaccgtactgtacgggccatgcccagccgacgagtgcttgggccagctctcctgctacgcggacgcggagacggcgaaatgcccgaaatgcggtttcagtatgcccgtcgccctcatcagggcggaacgggtggaacgtctcctccaatcggaggcggtgagaacccgtggcgaactgttggacatcatcaaggcgtgcggaatgcacgtgaaccgcagcactttgcgtagttggatacatcgaggccagttgccccagcatggcgaggatgcgtacagcaatccgctttaccggttcagtgacttctaccgtctcgcgtccggcctgtcggaggacgcggacgtgtgggagatcatgcaggcttcgcaaaaccaatccaaggaaggagacgacaagtgagcaaccagattcaaccattcgacttcaacggcattcaggtgcgtgtcctaaccgatgaacacggcaacccgtggttccttggagcggacgtatgcgccattctcggtacggccaccaaccatattcgggaatacctcgatgccgatgaaatcaccaatatccgtagtacggatattgctcagaacggcggcaaggcacccgttttcgtgtccgagtccggcttgtactccctcgtgttacgcagccgcaagcccgaggctcgcgagttcaaacgctgggtgacgcatgaggtgctgccatcgattcgcaaacatggcgcgtacatgaccgaatcgactttggaaaaggcagtcaccgaacccgacttccttatccgacttgccacgcaaatcaaacaggagcgggcggaaaaggagaaggcccaagcacaggtcgaacggatgcgtcccaaggcattgttcgctgacgctgtggaaacctcgaagaccagcatccttgtgggcgacttggcgaaagtcctgaaaggcaatggcgtggatattggcggcactcgcttgttcgcgtggctgagggacaacggatggctgatgaaaaccggcagctctcgcaacatgcccacgcagaaatctatggaattgggcttgttcgagatcaaggaaaccaccgtggttcactcggacggtcacacgaccatcaacaagacgccgaaagtcacgggcaaaggtcagacgttcttcgtcaacaagttcctcggacacagggagattactcaatgagcatcaatcttggcaccacggaagtggaattgagcttgtactccaaggcgcttcaactagccacgttcaccgtggaagtcccggtggtgggcgaactggaaccgggcagcgtgtttataggtgacgacatgcgaccatgcgcgcacgcgaccgtgatgccgccgcccgacggttccgtcgaaaaggccgttggagccggtgttgaagcgtttcagaaggcgttcaacgagtcgatggaatcgaggggcatgtgaaccggctgaaacgactgttgcacttggaggagccggaaccggtcgaaaaaccggaacctgaaccaccggtagtggaaccatgccccatctgcggactcgtacccaaactgaagcatgtgtgcgtcacccgcaactaccgcgactactggctggaaaaagactcgtggcagctcttggaatggtgcgatcacgtcgaaagcatcctttcgttcgcctcgttttttgaagacgagagtgttcagaagtggaataccggttgcagacggttgaaggcagtggttgacgagccggttcccgaatgccctgtctgcggggagaaacccgtcgtgcaaacggactcggagtcggatattccccagcttgtctgctcatgcaacgaactgttgagcaatgtggagataacaaacgtctataagcgcaaacgcgagtggatacgtcgttgcgtggcgttgaaacgcaagcaggacaacgtgagtgaaatggaacaactgatcggagaaacacaatgaacggacattattcggttatcacgaatttcggctgtcattggacatgcccctactgcatcgtaaggaaaaccggattgaacgtgccggtgacggacatgcaggccacgctgcggaccatcagccgtgaaagcgaacgccaccccatgaggttcctgagcttcagcggcggcggagaccccctgttccccatgcgcgagccggaagcgtcgaaacgtgtcgccttctaccgggaggcgatacgcagggccggagactggctcacggaaaccgagatgcacaccagctacttccaatgcggacgcaacgtggctcaagtcatgcagcaggtcaggttcagccgcgtggtgtatcacatgcgtcccacgagcttgtccgatgacgtggcgttggcattgccccgcaaatggttcgacggtcagaaggtgcgtgtcgtgtacgtggtcacccccgatttcacgccggagcgtatcgaccggatagccgatctcgtggccagcaacaacgtggtcgatgaactgtcgttcaggcagatggtcaaccccgacaacaccatcgaccacacgtgcgaggagtatctgaaggccggccatcaaaaacgctggtggtacatccaacaggatgattacaacacgtacgtcgtgaacgaccggctttacacaagattcagcgatatcggcaaggaggaccacaggtgagcaagaagattcgcgtcgcatgggaagacctacagcccggcgacctgattcacgtcaaaggcagtacgaacgtgtaccagttcatccgctttacggaaaacaagtgtcaggctgaggtaggcacttctggagtctgcgccggttggggagggcggaaagtccgggacaatgaaggtaaagttcgttactggttcgagacaggcccgacagctatgctcgtggtctcgctcctcggtttcgcctatgccacccgtcccgcgcctaagaagattgggctggctggctattacatgccgtttgattcaggtgaatactggctgaaaacctcttttggctggtgtcgaatccttctcgttctcaatagggttggccagcccgttcagccgttaagcgtgggatggtacgacggagaagcgagtcattgccgtacattctattcatggcacgaaatggtcgaatgcctccacccacgtgaactattgaccgctgaggaatactacacgcgcaaagccaagggggaactatgacgaccattcaggcagcagggcatgatcgcctgctgcaatgcgtgggccagctacatgatcgtgcacatgctgaccgcttcgctgcatttggccgcaatgacacccgcattgacggagcagctgaaccatgcgcgcaaaaccattcacggcgggcaatgagcgcgatcccaatcatcctgttcacgctcctactgggggccgtcgccatcatcgagaatcggagaaaatattgaccaaggaacctgagacgctgtttccccatcagaggtgcatcatcgacctgaccgagttcgcgcacaaggtcagcgtggaagtccgcgtgtacgataccgaggaaaccatgcggagagccgcctgcatcgactcggtggaatcctccatcgaatccgatgacctcgacaggccgattggagatgccgcgttcgaaaacggtacagccggaatcaccctcatgcagtccgcgacaatcgacacgcagaccaatgtggtgaaatacgggaactcccccatgtgcgtgatctatttgagccgcgaacacctgctgccgcatatcgtcagccatgaatgcgtgcatgctgcgatgggcttgtacaacgccgagattctcggataccgacacaaggccaaggcatgcaagcacatgacggtctcaaatgagcttgtcgcatacgtgcaatccgaactgttccgctgcgttatggagttcctggccgatgccgttaaaacaacagaagaggaacaatgagctacatcatcgaccgaactaattacctcttttcccctaatgactcgccttacaagaacgctcgtctcgtggaagtccacgaaccgtttgaacgccaactaagtaaaggagtcaccgagaaaggctcccgcatcgagaagaagtggatcacggacgatgacccgttgaccgtctatacgaacgaaggccgtatcgtcgtgcaggacaccggttactcagagtatcccatcggtattgagatctacgacgattaccgggaataagaatgccgtcctagtgtgcttccatgagaggcagtggcggcttctaacagtctcaataataaaaacccgtggaacgactctattccgagtgctccacgggttttcttgtataatcgggcccacatttatggttatcagttattagcatcgtcatttttttactcgtggtaaccgcccgtcaattagcaccggacacgcactagttccaatcgactggggcaagcacccgtagggtttcgtcattgttgacgatctcccacaatctcgccatgtcatcggccttgatctgcgggtaatcatcattcctgtcataaacgatgtcgaaaccgtccaatccggtgagataatccttgatattgaccaagcctttatcctcagccttatcgatggtgccggtggaaacgagcgcgtcaccgaacggggagagtcgggggacgccatgccccgaatacgtccaattgccgataatcacgtcattgttggggaatatgatgattccgctctcattgttggtcgcgtcgaaaagcgtgtcaaagtcagtcataatagctccttgggtatggttgctaattcccagaaggccacaagtcctatggctttctgtgtatcaagattttggtattccttgcataggtcggcggcgaacttggcgagattatcgggggcaagcacatagttctccccgctctcccccgcctcgtcatagtatttccacacctcatgcaaggcggctctcatacgttcagcgtccattgattacctcctgattccagtccaacatgtcagcggccaaccattgcccgccgcctgaagcattggcgtacagccaagccctgtaagagattcgagccgccttatcgcgtttaagccatgccttcagccatatgagacgcagctcccagcgtggtatacgccgccacaactcggtgttggtggcggggtcgaaacgctcataacggtagatcgcggtaatcaattcgcccactttctcttgacatgagagccgtcctcgtaatcggcgctgaccatatcgttgtccagttcgtcaatgtccaacaggtctccaacgccgttttcgtcaacccagtcgctcaactggttgaacgtcaagcctttcggcgcggtgacgtgacgcttctcgatctgcgtcacgcgctggtaaatcgtgtagacttcggtttcttcatccatgatggaaactcccttgttattgtccggtaaaacgattaacgggacaatagaacgctctaaagtcccgtctaaatgctgatttatgtgaaaaccgcaccatagaaagccctatgatgcggttctaaatgatggtttctataagaatgaccccatagaacaagtccataggccatgaaaacgataacggctatacgcttcgcctgtatggtggaatgcccaatgtggctttcaacccgtcgttaacatgctccgcgtccctcaacgagagtcgtccgaaccattgcagcagttcgctcctgttgaagtagaagcgttgcgaacagcgcacgagcgacggcttcaacagcccctcggccttccagtcgagcagcggcacgtcaccggcctcatcccaatcagtgttgccggttatcttcgccacgatacccgacaccagatcgccgtcaacctcggtgataaccaccggacgcggcttcccgataccgggatggtcgggaaactcgacccacatcagccacacgtcatacaggcgcggttcatttggcgtactggtcatagacatcatcctccgaatcatcccaatcggcgggcagtatcacatggcccttctccgaacgctcgaacatgtatgcattgtgaacaggcggcaccgggtaaccgtccggcgtgtgccgcgtcggcctgaacggcaacccgttgtccaccagagactggcgtaggaacatgttgactgcggtgctcaggctcatgcccatggaatcgtagagcgcggcggcacgcgccttgacatcatcatcgatattggcgaccagcttacccataacaacctccttaacggttaatagatggtatcaattatataccatatttggttaaaaacggaatgccgtccggtggaagtgaggaaaacaccgggcggcaggaatcaataggcggtaatgacggccacacggccattgtcggaatactccaccttgcgaaatgagtcaagataggactgctccgcaatatcgccgccttccatcgcctcgcaataggcccaacaaggcacccaatgccagaaacgccaaccgaagtgatggaacgtgcacgggttgatctcatgccagcagaccagccattccactgcgtaggtcagccactcccagtaggcgcggggcttgctgattcgagtgtaacggtaatggtcatgcttgtcttgcatatagtaagtggtcatttgaaaagctccttagaacagcggcaaagcaaaccgcttgtcgggtaaatcggtggcgttcaatgccgccagaatcaggtcagacgtgtggagtggaatgtttgcgcgtaccgccgcgatattatccggcgtatacgcatagccagaggactccagaacctcacgaatcttgctagtgggtatcttgacttccatcattcccaccccagcatgtcgtcgatgcaccagccgatagcgcactcataccggtcatacgtggtggaatacttctgtgagaacgcctcacgcaccctcttgtcgagcatgtccaacgacaaaccggtttcggctatctgctgttccgcagtatcgaagtccggcgcggtgtatggcttgtccagcttcagcatggcacgacggcgtaaatcatcgataaaaccatgctggcagtcgaagatatccgccacgctatccgcgttatcggcggccatctcgtaagccgcctgcaacaacaggcgtacggctttctcccgaatctcgctcatgtcacgccgccttaacccacttgtcgcggacggtagccacgtaatcggccaccgccttttccaactgcctgtcactgccacgctcataacgggcacggtaggcgacaacgcacctgccattggccgaagcaacgtaggccaccttgcggcccttgctggtacggaagtgacggatagggcccaaaccttgcaattcggggcattccttagccatcatcaggtcaggcatcgtacaataggagacggcgaaactgttcaccttcggcggcacttcgggaatctcctgtgtatccggcgcgggttcatcatccatgaactcgtcttccaatatcgcgtcctcgggcataggcaccggccactgaacattgctcgtgaagcgttcctcctcacacttccagtttgcatcgatcgatgggtgcgcgacaatgccgccaaccgttttagcgtccattccggtaggtaccggcaccggcactgtcttcatacgctcggaatcgggtatgagcatccaaccatgctcaaggtcaacggagcttgacctcatgccattcaaaaagtcctcatactggactcccttggcctgaacattccacgccgtgccctgcgaagtctgggaaagtgaccagactcgtctaacccgagcgttcacataccgaacatcatatttcgagccatccttgcgcaaccgcacccacatgccgctcacggcattcacgttacgcgacgggtcattggtcagcttcttcattttggtttacctcacttgtaaagattcgattttgattgattttctggaatgagtaggcggctagaagactctcagcattcaccctcttcggtggcttcggtgtagaaaacgtcgtccatttggtcattgttgaaacgctcattgatgtaatcggaaattgccttaccggtatcgtcttcgttaattagctgactaatgcgggtatggctcacaccgttaccgtccaaaatgtaagcgtcttgcgcccaaccatcttcatgctcgaaagccttgttatattcggtttccgtcacatatccccagtcgccaaggcgatagatgccctcatagggttggaaaccgtcatagcgcgtcaatggcgatagtttttcgtcaacacgttccaccatgtcggcaacatctttaacggtaatggacattttgaatctcccttaaacaagaggggcacggccacaacgccatgccccacaacgatttattaaggcctttcgctgtttggtgtgggtgagtgggtcgggggggtggtggtgctggtcgggtagtttgggggtatggataccacgtcgttgttcaccgccgccctgcaactgcctgacccgtggagggtgtcgggcgtggagttccgtgacgaggaggacggcagacgggaactgcatatcgcgatcgggttcgcggcgggttcgcggttcccctgcccggaaccggggtgcggcgaggccgcgtgtccggtgcatgacgcgagggagcgcgtgtggcggcatctgaacttcttccagtacaaggcgttcattcacgcgggcgtgccgcgcgtgacgtgccccgcccacggcgtgcacgcggtcccggtgccgtgggcgaggccgggaagcgggttcacgctcctgttcgaggcgatggtcgtggagctggccaaaagccagccggtcgcggacatcgccgagcaggtcggcgaacatgacacccgcctgtggcggttcatccgccattacgtggacgaggcgaggctttacgaggactacacgggcgtggaggccataggcatcgacgagaccagccggaagggccaccggtacatcaccgtggtcgccgacctggtggagcgcaacgtaatctgcgtggtcccgggcaaggactcgaccacgatcaaacggttcgcgcgggatttcatggatcacaacggcgatcccgaccgggtgcgtctggttacctgcgacatgagcctggggttcgccaagggcatccgcgagcggctgcccaacgcggcgagaatcatcgacaagttccacgtgatcaaacacgccaacgaggccgtcgacaaggtccgcaaacaggaggcccgcggcaacgcgctgctcaagcggaccaagtacctgtggttgaggaacgaatcgaacctgaccggcctgcaattggaaaccaagcgcagcctgcaacggcgacgattgaaaaccggacgcgcctgtcagatgcgcgagaccctccaggacatctacgacaccagcgccgatcgagccgaggccgagacggccctcaagcgtctgtgctcgtggatgacgcgctcccgactcgaacccatgaaagagttcgcccgccagatacgccgccactggcgggacatcctcgcctacttcgaccacccctacaccaacgcgatcctcgaaggactcaacagcgtcatccagaacgtcaagacccgagcccgcggattcaagaacatgggctacttcagcaccatgatctacctgacctgcggcaaactcgacctcagcaccgtcaccacctgacagacccacccacaccaaacagcgaaaggcctttattaacgatggactcgcaccatgtagcccctaccccacgggactagctccacgggataacctttggcctcataatgcgattgagtggcaacagccacgggaaacgacttgcaacggtaatggtcaatcatggtcgatcactcacccatatacgcgactgggttaagttgcatgtcgatacgccgccatgccctgaccaattcggcggtaggcgcgtaccgttcgacagccgaccggctaccgtcgtaccgtgcggccatatcattatcaaaaccgataacagtatcggccatgatatgacgcgcctctttcgccgtaatggcctcacaatgccaattgccatcaaacacgtcgtcggcaacccaagcgtcacgctcagccctcgaatcaaacaccctgagactcccaggccatgacccatcatcccatgtcgtgccgataccataagcccagcggaaagcgtagaagtagcgtgccatcatgccacctcgccatcgaagtgacgttcggcggctaccgcgtacagcacgtcatgcatggtgtcggtactgtagccattgatattggtgacaacttgcaaagtctgctcggacacaccgtaatcatctttcagcgcgtcccacatttcctcaatagacattgttgaatctcccttgaattgatgaagcgcggagacagccgcgcgactgattgaatctgattgaaagttagtagcgttcgccgattagcacgccgtcttggtagatgtacaggccggtaccgcgtccgttgcccattcgagcactatcccagtagcagagtccagcttgacccgagccgtcttcgttctcacattgcgggatgttcgcggtatcactaccgcaagcggacagggtgaaaagtgtgattaacgcggctgaagccgccagaattttacgcatggttcctcacttccatgtgaggcgtgctaagatagcacagcctcgatttgattgattggttagagaactttcaacttaaggcacgcggctaggtagttggcgctacttagccgcattcttttaacgcatcaggtcgctcggttggcagttgagtgcactggatatcttcaaagcgttttcaagagtcatgttccgaacgtctcgccgcccggtctcataactgctgatgattgttcgcgctattccagtgcgcttggctagctcaacttgtgttaagtcggcttgtttgcgcagttccttaagtcccataggcttacccgctttctctagtagtaggtaaaccaattatgacagcaaaatgtatcatttgcatgtagggaaacactgttaagttctcaaacttgcttttgtcttgcccgattgggcttgataattgatagcataacgtatcattttggtttaaacaaatcggcgtgtcggaaaaccagcacgccgaacagctcacactgacgcgaactcacgcaccagcgcgtgccgcatgatgtcatcagcggacacgccacgacgtttagcgacggcatccaacatggccgacatgtcagcgcttaacgaaaacgtccgactgacagcatccgcctgagcgacaggaacgacaggcccggaatacaccgcacccggccttccgccgaactcgccgttatccgcatcgtcggcccacttgtccaacatgtcatcagtgaccacacggccacccttcgcaacaaaagacatgacacttcctcctttacaaaagtttcagttcccgcagcaccttcggcgtcgcacgcatggcatggaacacatgccaacgatccgactcatctagtaccgccaccatttccagcaaacgcccgtactcgtcgtatccaaccgccacataacgcaacgggtcggtatcctcacgcgccataaaccgcacgacgttcgaccatgccacgcgcaccgaatcagcggacacgtcgggatgtcgagtctggatacgcgggtcaacgacgatatcgccaaccggcacggctcaccacctttcgatataacaggttccagcgtatcccgtccaccttgggacacgctatgagtgcctagactatgggataaacccagtgagctaggccgactgtgtacaaggcccacagtcaggcgaagaattgattagggcacacacctagctttcgctagtgttttctttcggcttgtcagcctctaacagcttacggggattggatattttaagcgcgtcagctagcttgaggacaacgttaaatgaggcgtcgcccaagtctctagcgcccgtctcccacgcggcgattcggccacgggtaacacctggcgttctgtctgctagctgctgctgtgtccagcctcgcttctgcctatactccctaagactcatggcccacctcgcttttgttcagtgggcccaattatacctttggctcgtttcgcagacggggtttctgatgccatcgcgccgcgttctttcagcggcccccgcactactcgcaaggtctctgccttgcttcattatccctcaccagtccttgactgggtatcggtaacactattcaattctcaaactctcatgccactcgggatagctctcacctatcaccgggacttcgtgcgccgctgggactcgaacccagtacccgcctatcggcggcgctgtcagtagttgagctcggcccacactcggtcgaacttgcggtatagctcggcggggtattcctcgttgtcgtccatctcgataccgagggctatggccgtgaggtcaagcacgttgtcataggtgcagggcttgataccgtggctaggtctaccgccgctctaaaggccttggttttaatctccgtggtgttcatctcggggttcctttcttggtgttccgtggttgatggctatcactatacgcgctaccacttgggtacgcaaatcgggtataaatacataccacataaacccttggaaacactagcattcttcggcgtgtcgaaacttacgattcacgacgaaaaatcgcgggtatataccttatataccaaataaaggcttaacgagaatattctcaataataaatatcagaaaacaaaacctgagtccaccacactcaactctcgaaagttgagccacgacacaccaagattgacaaaccacaccacactgctatcattcttcgcccacacacgggcacgaccacacaacagccaggacagccccacacccaccacacacagcacacggccacatcacggccacacggatagggctagccacgccacgaccgcacgaccacacacaccacgcataggcacgcgccgcccacacacacccatacgcacgcccacgcacacacccgcgcgacaccaccaccaacgagtagacacgcccacatagggccgggaggggtacccccacccaataaaaaacaaggccgctaggtgtctggtttcgtccgtgaatgccgctcccagacttttttgaattagcgtgacatggtgtgtcgcaccaatgattgcaacggttttcgggctgtggtcttttccggtttctgtgcaacgcttgttgcaacgcttgttatgagtaaactgtcgtgtagatggattgtcggggattggagcaaggctcagattcctgacaaattattattcaccccgtatgccattggcgtcggggttttgtttttgccgtgcctttagatcacatcaacagacagtgttggtgtcgtttcttgaaccggggcgcggtgtggacggttggcagagtccggttgattgcagtggcttgctaagccgccgaacgtcgttttggcgttccgcgagttcgaatctcgcaccgtccgcgaagtatcgagggtcgctcccttggtgctttatgaggttggctgaataaacccggattgcatgtatgccgggttaaggctgcgtcacggcttagcggcaccctttagcgggggaagtgtgacgaggaacgctacagcggtacacggttagtgcatcacatgctcggcgttggtggtaaaacgcaatccaccacctcgcaattcttagctcatctacatgtcgtagaaggagtttcctaggtcgtttctatgaagcggcctttgttttcccgatctggtctgctacgtaggggctgggggtggatgacctacgggtcgcgccacaatcggggtctggcggtaggcacgtggagtgcgcgtcggctgtaacccgactgcctttggcaatgggagttcgattctccctgccgccacaatcgcaatgtagtgccaaatatctggttgttaggactggggctgaatacctagggtgtcccggtcgcagagaacgtcgggtagcgcccggagatcgtcgcattatattcgtgcggcgcgttgcgagatttggagaggccagccgattggcggcggcaactgttccgaaaacagtctgcccttacgggcgtgtgggttcgactcccactctctccgcggagacggctggtcggacgtctgacgagcgaaatattacgacctatatgcccgtggccgagtggttcaggcaccggtctccaaaaccggttacggaagttcgattcttcccgggtatgcgatgccttgagaagaggcagctcttggcggtgacagcttctcagtcatcgccagtcgccggcggcggcttcacgccatgccgtacggcaataactgaatagccttcctctagtgggaggcatggcattgtagctcagtttggtggagcggacgcctcgtaagcgtcaggtcgccggttcgagtccggccattgcctctaggtgccgtccgaccgcagaacacgtcctttctctcgctgcttatgctgcgcaacggacggcaccgtcccctttatcaaggagtcgtcatggcttggtcgagttcgaatcgcagggaacggttcaatccgggttgggagcggactcgcaagctgatattggagcgcgaccatcatcgctgccagtggccggtgaccgacgagttcggtttcactcatatctgtggccgtccggccaatcaagtggatcacaaggttcgcaacccgtcgcatgacgatgattcctccgagaacctgcaatccctgtgccaataccatcacgagcagaaaacctgtcaggagtccgccgaacagcgtcgtaagaacagggagcgtcggaaggaagaggaatggtattcgcatccggcgtatcgacggactgtctcgtaacgggttgcggcgagcttgccgcggccgatggattgtgccgtagccattaacaatcgcaaggcttattccggtaggccggtgacgcctatccgtgcccgtgtgtgtccgatgtgcggtatggcgttccagttgacccgatgctcgaagattttctgttcccctacttgtcgcaagcggtttcaacggtttcgggcgaagcacccgtatacaacattggccagtgcccccaatccgattatcgaatcggagcctttgactcccgagcctgtgcggagcatgacgtatggggctttcacggaggctgatatctgggccaagtgtgatggcacttgcaaggggtgcggcaagcctgtttcaaaagacattgacagtccggacgccggtactcccgcgtggattgtcccgcccgaggacggtggtgagccatcgttcgagaatcgggcgattttccattacaggtgcgtgcgacgccacgtctgacgcgccttctgcagaacgaagcccgtcatgggccgaaagctggtgagtcatggctgggaacggaaggaaggcggcgaagcccaagacgggtggcggctatgaggtcggagcgccgctggccgaggtgccggaggattggacattcgaggaattggagcccatcggccccgaactaccggacgcttccgaactgaatcttcttgacggcgtgtggagcccattcgtccgcaaatactatgacgctttccgccgcacccctcaggcgcgccagttgcgcacgaaatgggagtggtggaatttcttctacaagctggccgtcatggacaagagcatcaagaaacgctcctatgacggtctggccccggagatgcgccagtccatgaaccagtatggtgatacccccgacgctaaacgcaaactgaagatggaggagtcgcaggccaacgacatggccgctgggatcgtgggcttccagattcccgatgacccgaacaacgatttcgatgatcgtgcgcgggcggtgctctgatgcatgacgtcattcccaagctgacagcgaaggacaggcagcgttcgctgggccgtctggcggtgtggtggattgagacgttcacgctcatcgggcgcggagacgcgaagggcatgcgtatccgccactcccccgaatacttccagttcatcatcgactgctatgcgcttgaccgtaatgggcggcgcaggttcggacaggtgttcctcgcacgtccgaaaggctgcaacaagagcggtttcgccgccgagatagcgatgttcgaggctttcggcccgtgccggttcgctggttgggcgaaaggcggggaaacctacacgtttcttggcaagacctatacgtatcgcaagggcgagccgatgggccgtccggtgaaatcgccgctcgtggtctgcttggctacagctgaggagcagactggcgaggtttacgacaccatctactacaactgcaccgaaggctatctgcgatttttggccggtgatggcatggacgcgggcaagacccgtatcctgtggcccaagaccggcatggagattcgatactcgacagccgccgcgcgaagcaaggacggtggtctgcagacgttcgtgtgcttcgacgaggttcaccagtacaacaacaagcgtctgcgtgacctgttcgacatcatgacccagaatctcacgaagcgtggcgtcgccgcagacccgtggtatctgatgaccacgaccatgtatcagccgggcgaggacagcgtggccgaacgcgcgttcaagaccgcgcatgatctcatggagggccgtctgcgtggctgggaggacctgctgttcgaccatcgttacgccgacttggcgttggatgatttcgccgacgacgagaagcttgagcatgcgatctacgaggcgtacggttccgcgatgaaatcacctgacggcaaggattacatcttccttcccgatgggcgtatggtgccggtcggccccgatgggcgttccgccgaaggctggtcgttgagggacgagggcgtggagcccggcccctcgaagtacggttggtgcgatctgcggcgaaccgtgaagaagattctcgaccccgcatatgatccgaacaacgcgatcaggttctacttgaactcgctggcttccgccgtggatgcgtggctgaccgaggacatgatcaaatcgcatgcggttcatcgtgacattgtggacaaggccatcgcctctcgtgacctgaaccggttgaacgacgcttggcagcaggtggtctccgacaccgatgaaatcacgttgggcttcgatggctccgtgtccgatgattccaccgcgttggtgggttgcagggtgcgtgacggcatgctgttcctcatcaaattggagcagaagccggacggccctcagggcacgaaatggcgtgttgaccgcgacagcttcgacggcagggtgcgttgggtgttcaaccattacaacgtggtcggcatgttcgcggacacggacgaatgggagccgtacatcgcgcaatgggaattggattacggtgacaggcttcaggtgtatccgaggtcgaacggctcgcacatccgcttcccgatgaacggctacaagcgtgacgtgatgagcgaactgaagaccatgcgcgccgcgttcaacgagcccatgagaaccatatccaaatacgacgagcccgatgtgacgaacatccaactgttcgccgaccctcggctcatcgaccatttccgcaacggacgccgcaaggacaagcccgaaggatacctcgtgttcaaggagaccccgaacagccctcataagatcgacgccgccatggccgggctcctcgcctaccgtgcccgcgacatctacttgggtgccgtcgtttccaacgaagaggagtcgttcgcccccgtgcgcgtctggtgaatctgatgaaaggaggccgcattggccgaactgcagagccttatccccggcgacgaggagcctgacggcgatgccatgctgctgacccagctggcgaacggcctcgtatcccgtattccgaccctatgcacgttgaagacgttctatgacggcaaggagcaggtgccggtcaaatcgattccgaaaagcaccaaccagtccggctacgcggtctaccagaggttcgtctccatctgtcaattggatttggcgaaggccatcgccgatgcggtgatacaccgccagcggcccaccgggttccggctcatcgccgacaagacgatgcgttccactaaggcggacgacatgtggtctcagtgccgcatggaattgaagagccgtcagatgttccacgatctcgccgtatacggcaacgcctacgcactggtcaacaagaacaagctgccatcgcatatcacggtgctcagcccgtggaacacgtacgtctcctcggacgaggattcggcggtcaactactggtacaaggccagcgagggctgcgaatatctcgccctctaccgtctgatacgcaatgatgacggcagcgtgaaggacgtctactgccgcatcgcctacaacgagaccgactcccgaagcctccttgaagaaggcgacgaggaggagatatacggcatcgccaacgacgattccaagattcatccaacgctgtcacccacgttccaatgggatggcggtgcggaaagctcctatgatttcgcggagaaatgcgaatgccttcccatcgtgcgcatgcacgcgccgggcggcaagggccagttcgagccgcatatccctacattgggcagcatcgaccagcagcgtttccagcgtttctgcattcaggaattgcaggcgttcaagcagcgtgccgtgtcgatgagcaacatgcctcagttctacaaggagtccgacccgcaggttcgtgacggtttggctcaggccggagaccggatcgactacaaggatctgttccagcaggggcccgacgcattgtggctggttcccggtgacgcgaagttctgggagtccggcgtcacggacatcaacccgctcatcaccgccgtggcttccgacatcaagcatctcgccgcctcctccggcaccccgttggatattctcagcccggacgtttccggcagcgcggaaggcgcacagctcaagcgcgagggtctggtgttcaaggtcgaggacatgaacgcgcgtgccaatgacgggttcacccgtctcatgcgcatggcgttggaggccgatggcaacagcgccgccggcgaacggttcgagaccgtgtggaagcccatcaaccctccatcacagttggagcaggctcaggccgcgaactattcgaagggcattcttcccgtcaagacgaacatgcgccgcagctacggcatgaccgagatcgagatagccgaggccatgcaggacctcatggacacgcagttcgctcaggccatggcctccgagaacgcgatgatcgaaggcaagacctcccagcagtcggcgggcgtcctgcccgacgagacggattctctcgcgttcaccgataccacgagtgaaaacgacgtggtgcaggcggatgagcccccgaccgtggacggtgaatgatggccgttatgaccttggaggtcgcatccaacgcgctccaatcctcacgtcagaggctcgtcaacgagtatgtgaggctggcccgcaccatgtggctcagcctcacgccagccgactggtggaacgacgccgtgacctacggcgcagccgcgaggctcgcattgctggaactcgccctgataggccaggtgcgcaggctgggaatcagctacgctgaccagacgctgcgcatggtgggcgtcgctcccgccggcaatgtgcagcagctcgtctatccgagggtcaacaccgacccgtggctggtggccgcacgccccgcagaagactatcgcggcgaggccgtcaagaaccccggcataaggccggaaacatggcccaagaagggtgatgagctgttcgatgaggtcaacaagtggctgcaatccgcgttgcagcgattgcagaccaacgtgtgggacaacgtggaacgggcctccaccgacgccacattgggccggtatcgcggcagcaaggtgctcgaataccgcagggtgcttcatccggagctttcccgttccggttcgtgcggcctgtgcatagccgccgcagaccgatggtattcgaccgcagccctgctccccctgcacgcgaactgcaagtgcggcgtcgcccctgcgggctccgactacgatcccggattccaattgaactccgacgatctcaaaaagctctacgaacaggccggaggcaccacggcggcggcgttgaagaacgtgagggtcaagaccatcacgcacggcgaactcggcccgatcctcatggcgcaggacgcgagtgatacgccgaacccggttcccggcaaggattccgacaagtggaccacgccggaccggaaaaccacgctccagcagttccagcggatgaaggaccgtgcgatcgagttctccaaatgctacaagcaggtgtccgacaccggcaaggaagtctccttcagatacgagggccgaacctacaggttcaagccgtcaatccatctgaggcaatcatgggcataccaacgtgccctgcttaaccaagtgcagtcgatgctcggcaccgctgcctgacacagaaaggccatcatggctaacaatcaggagaatcagaccgtcacggacggttctcagaacgccggccagaccgtcacggccaacaccggcacggtttccaccgcgaacagctcgatcactggtcccatcaccgcttccaatctcgccgccaatagcgtgaccccccagagcatcatcgccaacgcagtgaccaccgagaaacttgccgcgaacagtgtcgatgagacggaaaacggccccgactggaaggcattgtcccgtaagcacgagaagcaggccaaggacaactacgagcagcttcgcaagaccgaagccgcctacgaggagtcccagagccagctgcatgacttgcaggtggaaaacgcgcgcatgaaggcccagaaggcccacccgcagatcagcgatgacgtgttcgccctgtgcggtgagaccgaaccggagaagatttccgaatgggccgaaaaatacgcggcactcaatccagttacgtctccggtgaaggcagaacctgtgcgggagaaggccgaacaaggggcacgtacccgtggcgagggagacccgaagattcgttccggctcgttcgcggacggatacgccgccgccaaggcacgtcaggagcagaggcgccaagcccgctccgccaagtaaccacaaacattcaatcgaaaggaaaagcacatggcatacgagaatgtgcgctccaccggcatcgtgaccgtggaggagaacaacgagtggcgtttcggcaaccacaccgatgacggcaccgtgagcgtcaccctcgacctgtccacgttcaacgtgaacgacaagacgaagcgcgacaaatacctgaccggcctgggcgacaaggccacgaccatctggatcaagagcggcatcccgctggccaagatcaccgccagcggcgaatacggcccgtatgacccgaatgctaccgatggccgtcagaacaagatcgccggcctgctggaaagcatggtggagatcagcgtcacgttcggcggctgggatgtggtcaacggtgcgaacgtcggcatgcgctaccgtggtgacatcatcaagagcaagctgccggtcgttcccgccgacggcgcggtgtggggcggcagcttcttcgacatcgaggacgataccgtcaccccgctgtccaacgcttcggccacctccaacatcacggttccagcaacggtcaccgcggcgaacatcaccgacgcctccaccgtcggccgcagcatcctgaccgccaacgatgccgccgcagctcgcaccgtcatcggcgccggcaccggcaactcgaatttcgacggctcctacaacagcctgaaggacaagccgacgattccccccgcctacacgctgcccgccgccacggcgaacgcgctcggcggcgtcaagcaggtgaccatcgcagcgggcgccagcgcggcggacatcgtgaccgcactcaagacagccggcatcgccaagtaaccaatccaacaacccttataagcccgcccattgtggcgggctttcgtatatctgaaaggaaccctcaatgagtggaaccctggaaaagaacatcatcagcccgtccgaggcgtcgggtgtggtgcagtccggcttcgatttcatcgacggcctgctgccgttcggctccgtgttccccgtcaagtcgaatgacggcaaggacacggtgacgtggcagaagatcatcccgccgaaggagaccgacgccatgaagttccgcgcctgggacgcggaggccgctcacggcaagaccgtcgcccagtccggcgagaactacacgggccttatcccgctgtcgaagatgggccacatctccgaacgcgacgtcatcaaccacacgggcgattccacgtggctgcatgacaaggccgtggaaatcctcacccagttgggccaggaagccgccgtacgcatcgaactggcccgcatcgccgccatggtggacgcgaagatcaccgtcgaggagaacggcctgaaggccaacacgtggacgttcgaccgtccgaccagcatctccaagctcactcccgccaaagtctggtcggacgtgaagtccgatccggtcaccgacgtgcagaagtgggtggacgccatcaagaaggagcgtggccgtactccgggtgccgcgctgaccaccagcaaggtcatcgacgcgctgcgcaccaacgagtcgttcatcaccgaatacacgggcgtttcccttgccaattcgaagccgcgcctgacccgcgccgaagtgctggacgtgctgcgtaccgcctgcggcctcgccgacgtgcgcatgatcgacgtgctgtacaccgaccttgaggtcaacaacggcttcaagatgccggtggacacgaacacgctgatccccaacggcacgttcatcatgttcccgtcgttcaacgatacgggtcttggtttcaccgcctccggcccgacagcagaaggacaggatcccgaatacggcatcaacaagagcgtgaacgacggtttcatcggagccatgttctccggtggcgccccggtcaagtacgacctgtgggccaacggcacgatgatgccgatcctgcaggaggccgtcagcaccgcgaaggcttccgtcctcggatagtaaggaggggtcgtggcttccatcgattccatcgactggctgaaatggttgcgtgtcaacgcgctcgaccagcccgaccttctccttgaccggtttcccaacgcatggctgctcaatgagtgcggggtcgctgccgacatggttcaggctgaatgccagaacgtggccccgcgttatcagaacggcctgttgaaggagcgcacgcttggctatgtagtgagccagatggtgttgcgtgtcgtccgctaccggcagttcaagaccgaatcgaacggcagctactcgtatacgaacttcgatgcgcaggacaatccgcccggcaaggacggttccatgaacctgtacgtgtcgaaacgtgagaaggcgctgctggaaggccattccgactcgatgggcccgatgggtaccgtgcatatgggtctcgaccgcgcctacggcatgtgaggcgcttatggagacctatgacatgggccacctctacgacggggtggacatcgacgagctgggcggaggtcacctgtacgaccgtacagaattgaccggccatggcgtccaacagttgttcgatacggattacgtgatcgtggtcaaccgtcgtcatgtgcaggacgcgcatggaggctatcacgagcaggtcggcgacccggtgaaggtcgtgtgttcggtcgaaggccgggcgcagcaggccggcatgttctccatcagtggcgccgaggacaagagtccttccgggcagaacggcgggggccttcaggaggtcacgcccttgcagattctcgcacgccagtggcccggtgatattcattcgcgtatctggtacaagggcgactggtatgacgccgatggctatccgacatggcgtggcagcggcagcgtgctttcccagcattgggaggttcgctgccgccgcgtggtcatcggcggctacgtgcccggcggaattcccgaacccgaatggttgaaggaggtgggctccgatgggccgcgtgaccatcagaccggggataggccgtgacgtggcgctcatgttcggcccctcgataaccctcgccgcagccgagaaagcggccgtcatggtcaaaacgcagatgggggttggaacggttgacgaccgtaatcatgcggtggcgcgagcggacttgacggatcgcatcgacgtctccgtccgccccggccatgcgcaggaccattcggtcgttctcagcgtcaaaggccgtgagggaacggaaatcgcctcgcatttggagttcggttacgtcaacaatcgtgccggacgtcgtttggccggcatgcattccatgcgcaacgttgcgtcgaagctgaaggtgtaggccgtcatggacaacatcttcaaacacctcgccatcgatgtgagggaaagcatcgacgccgaacaggtcgtctacgaactgttgaaccgtgaatatccgaacgaggattgggcgtcggtcgcagtgtacagcgaaatcgacctcgacctgaacgccgtgaccgagaacggccgggtgattctctatgaggtgtctcccggccaacaggttgacaggggcttgtggcggttcaccgtatcgttcaccgttctcgccgccgacacgaacaatccgagcggttttgcccgcgacctgtaccgcaccgtcatgggatggccgttcgaggagaagacctcggcgggcaagataagccgcatcaacagcattgattccccacagcgtcgcagcgacgccaaggagaaccaaggcaagaacatcaaggaatacggtttcgacgcatcaatggacgcgcgggacctcatctgacctacaggggtcggccacatggccggcccttttcttttacccaaatccaatatccgaaaggaaccatcatggctattaacggcgatgcgctgcttcaggccgcgcgaggaaccgtgttcacggccccggccaagaccaccatcccgactgccggcgtcaaacagtttctgttgaactccggtagtgtgaaggtcggcaccgcggacactcccgtttgggataatctcggccacacgtccaattccaacaagatcagcttcagcaaggacggcggcgacaccaccaccatcgacacgtggctgatggccgccgcacgcacttccaccgaagccccgaccatcaccgtcagcggcgccagcgtccagggagacaaggcgacgttgaagaaggtcaccggcggctgggatggtgaccacggcggcgtgatcgtgcccatcaagccgatcgtgcagaagctcgccttgttcgtcctcgcctacgatgacggcgacaaactgtccttcggcttgtatctgccggagaccgatttcacgttcgacaccatcgacctgaccggcgacgagttcgccgagttcagcttcaacgcggtggtcaagtccaccgatgccctgaagaagggcccgaacggtgagactggaggctacgcgctgttcagtccggaggatttcaagtagggtccgcagccatccgcgctgcggatggtggagacccgccagccacagtcgaggctggcaaggatatccggctcgcgggccagccttccactctcggcggggtgaagctgccggctcccaccgcctgacattgattcatccccatacggttctcctatccgggccgtatggggattcttcattcacggatagggtttcacggataggaggacggcaatgaccgccaagaaaaacgacaccgagactccgaagaaggagtttcccgaaactttcggccagcttgtcgaggaatacccggagttgaaggggcttccagagctggttcccgcatacgacttcaacgcggagcagtccgctgatttcacggtgcttctcacgcttctcgacactcagatgccggggctcgacgccaaggatgatccgatggacgcagccctgctcgtcgcccgcgtcgtatccatctccaatgatttctacaagggtcttgccaaggacgagaaggcttacgaacagtgggccacgggccgtgacggcaacgtcctgttctcagcgttccttgccctgagcatgttctacagggtcgaactgggaaaatccgaagcgtcgaggacgcctaccgaaactgcccggtcgaactgacctgcgacttcagacgcttctacaaccttgatatgcccgccgccctccacgagtatgacggcgggtttctcgtaaggctcctgcagggtttgtcgggttatgacgagtccctgtaccgcgaatggctgctgaatcatcccatgcgatccgagacagccgatgagggcgaatcacggcgcatgctctcctatcaccgttattcgcaggacacgagcctcctgttgggcattttcaaccatgtgggcgcgttgacgtgcgggctcatggaaaccaagaacggcaagcaccccgagttcacgccgattcttcccccggacatggaacagccggaaaagccggtcgaggcgagcctcgattcgatgaaggccctgttctcctcctgatacctgaaaagaggttcaccgatggccgtatacgagggcggtgctgttggcatcagcatctacccggacaccacggagttcggtttcgaactgcgccgcaagctcgccaagtacgcggatgacgatctcaccattccgctgaacatcgacgtggacgacgcgaactggacggcggcgaaacggcgtatcaacaacgaccgcctctccaagaccgtcgaggtgcgaggcgatacgagcgcgctgcgcaaggccgtgcaggatatcgaggagcgtgacatctccccgaaggtcgatctgaccaagcagctgcgcgacctgcgttccctgcgtcagagggtcgaagcagccaaccgttccttccagaagttcaaccgttcggtcgatacgagttccgccaagttcaagcacaacaagacgctggtgaagcagtacggcgacgcgatggacaagacgtccacgctcacccgcaagtacggtgaccggcaaatcaacgtgctggataagacgaagcgtcgtatccgcaccctgcaggacgcgattctcaagttcaaaccgttgggttcgaacgtcgtggagatgaaagaggccaacctcgccatcgcccgcatcaggcgcgatatcaaacagcttgaaaacgatccgggcgcgaagattcgcatcgacatcgaccgttacgcgaaggtcatttccgacctcgagaacgtggcccgcaagaccgacgagctgaacagcaaggaagcccgcgtcaagttctacacggacggcgcggacaagctcaaacgcgagctggacgaccttcgccgccgttacgtgaacctgcccaaggagatagaggactcctacaggcaggccatcgaccgcatgaacacagccggccatctcgccggacgtgacaaggacttcaaatacgtcgcgaaccccgatctcgatgtgagcgaggcgcggcgcaaggcccgtgatttccagaacgaccacgacaagctggagatggacctcgacctcaagtccgctgcggcttccgcccacctcatgtacctgacccgtccccgcagcgtggagatctacgcaagattgcacgccacggacatgggcaagctcatcgacggcatgctctacggggccaccggccttcgcggcgtcaacaaccagttccagcgattggtgaacctgttcgacacgttggacacgaaggttcccatactgggtgcggttggcaccgtcatcggcggattgtccgccggcgcggtgaacctctcctccagcgtgctcggcgtcgccgccagtctcggagccatgagcaaggccgcgttcgcggctcccgccgccatcaccggcttgggtgcggcgttcgtcgtgctcaaacatgcgtggggcgaaaaaggcaccacgttcagcgaccagatcgacatcgccacgacgaagctcgccggtttcggcgacgccatggacgaggcgttctacgagaaggcgcgtccggccatcagaagcctgatggacgatgtgagcggcacgcttatccccggcatgaccggcatcgcgtccagcgagggcaaggtggtcgaggagttggcggacatcatccgcgagtccgacaaggccggcgagctgtccaccatattctcccgtacttccgaggccgtggacaatctcaatccgggactgcggagcgtggtggagtcgttcctccgcttgagcgacggcaccagccagtacctgcctcgcgccgcctcctatttcagtgatatggcctcgaagttcgccgactgggtggataagacccgagccaccggcgagatcgtcgcgtcgatgaagcaggtggtcgaacaggccggttatctgaaggactcgttcaagggcgtgtggggcatcgccacaggtctgtattccgcgttggcggaaagccagaacgggctcgaggggttcagcacggctgtaggcaaggccgaccgtgcggtgaactccgccagattccagaccacgctcaaggcgtgggccaagggcgcggaagccgcgaagaacgagatgcgcaacgccttctcggacatcggttccgcagcctacgagctgcgcgacaccaccgcgggcatattcaccgatgcaggcaatacgatcagctcgttcacccgtaacgcgagccgtcttctgaaaaactcgaaggacggcatcagcggattctcgtcgggagtgtccgaaggcttccagaaggtgttcgacgcgatcggcgacgcgagccccgcgttcaaccagctgctgaagaccgtgggccagctgtccaaaacgttcggcggcacacttgccgccacgttgaaggccagcgcgccgctcatcaccacggtcgccaaagccgccgaggccaccgccaatgcgttcagcaggctgcccgaaccggttcaggccgcgataggcctgtacgccacgttcggcaaggcgggcatgaccgcttggaacacggtgaagaccggtctggtcgagaacacgctgcgcatggtcgaataccagaaggcgttgaacgggctcggcgtgaccaccaagaccgcaggcgcgagcatgaaggatgcggtcagcggtttcatcgccgccaacccgtcgttgaagggcatagccgacagtgtgaggaacgcgaacggtgtgctaggaaagaccggcgctctggccaagggcgcgggcagcgccgtgctgggcgcgttcggcgggccggtcggagccgccgtgaccgctggcgtggccgtggtgaccgcagcctactcggagtatgtgaaaaccgctcaggccaatgagcaggcgtccgagaacattcgcaccgcgttggagaaggtaccggattccgctcagtccgcagccgagggaatcaccgaggttggcaaggccatcaaggagaatttcgacaacacggattattccggcacgaagttcgactggtggtcggatatgaccacgggttttgattcggcgagcgacgcggccaagaagctcggtctcaacgtcagcgatctcaccaagtccgttaccggttcgcaggccgaataccaggcgacacttgaccggctcgatgcgacgattgagaaatacaatgtcaacgtcggtcatggcataggcaagaacgccgatctggcgagggctgcgcagaaggtgaaaaccgcgcttgaggatcagcgcaacgagtacatagccaattccgaggccattgcccaagcgaacgggtatgcggagggttatgccacgaagctcatcaagcttggtgaggattccgattcggtgtccatcgccatttccactcaggccgaacgtactcagctgctggccaaggctcagcagactgctgcggattgggcagaacgtcaacgcacagctcagcagaatgcgttgaacgcggcttccgactacggtgaaacgtattccaatatgggggatgcgatagcccgcgtcaatcagttggccgcggagagcggcccggtttgggatgcgaacgctgctggcattcagggcgtgacgggctcgttcaacacgatgagcgaggccggtcgtgaggcgcagtccgcgttggagaatctgggcaattccggtcatgacctgttgaagagcatggtcgagtccggtgccagcgcggatgaggtgaaggcgaagcaggcggaattggcgaagcagttcctcgccaccgcacacgacatgggtgttcccgccgatgccgcgacacggttgcaggagatctatggtctgacccccgaggaggtcaccaccctgttcaaagccgaaacggagcagaccaagaccgctctcacccaatatctgagcaatctgcgagccatcttccccggggacggtaacacggcggtgttccagaccattctcgaaggcatcaacagtggtgccatcacgagcatggatcaggtcagctcgaagatggacgagctacgcaagaacgtcagcaccgacggttccggcaagtacacgattgtccttgacgccgatggcactcaggcgatcgtcgccaccgatattgtcaagaagcatgccgaactgttcaaggccggttctgatggtaatggttacacgaccaagctgaacgccgacgatctgacgaaagccacgttggattacgtcgaaggaaatctcaacgcctacgaccagttggctccgtccgccgacctgaacgcgaaggacaattcaggcccggcaaaggccagcgccgatgcgaacgccagcaactgggatgcccagcatcccaccgcgtcgttcgacggtgacgcggcaggagccgcaaacgccaagaggtcggcctcaaatcagggctggcaatggaacggcagcagctataacgctcagttcggtgccagtacggaaagcgtgtccagttccttctggagcgccatgcaatccggttgggaatgggcgaagcagaagttctttgccgtgttcggtgtcaaacgccagaacgctgagggcggtgaggtcgctggttcgggtgttaccaagaccggacgtgtggttggtcagggcaacaatacgagcgattcggttccgttgaatgcctacacggatgcgagtaccggtgagtacgtgatacgtaaggccgccgtgcaaagcatggaaaacctgtacggcaggggaatcatggccgccataaacgcgaccggcagcattcccagcaaatacattgcggacgcgcggcgcaccagccagatcaccatgccttccggagggttgaacggcggttccaagtccggaggctggtcgatgcccatcgaaaccagttcgggcgacacatacaaccagacgttcatctatccgagcgtcacaccaatcgaggttcagaaaaacaacaagctcgaccagtacgcgaacctcggtctcttgcagtaggaggaaatgatgctctccaccatgtcctacaaactcaacggggttgtgttggatacggagaactgtctggtcatcgtgggctccacgctcatgccgggcatcagcacccgcagaacggtcactacggtgcccggcgtgagcggaaccctgaatctgggtgttccgcccgtgttcgacgagcgtgagatcacgttgaaagtggacgccttcacaccgaaagtgtatgaggaatcctctcgaatcatgcgattgtgctccatgcctaacctgactcttacgagggtgaaggacggtgtggagcagtccacgcgggtggagctcacctcgttgaccgccgacgatgacagttcccatccgaataatctggtgtcgttcaccgcgaagttcgccatgccggacatatggtggcatgaatcggaatattgggatcgcccattgccattgaacaaggacggtctcgtgttcccgaaacccgtcaccatcaacaggttctggacaagatggtcgggaaaagcgaacaacagtacctcactgttggcggatttcatcaccatgtggcgtggtgaggccaacaattccgagagcctattgttcgagggcggtatccccggcgacggtttctggggagacgccccgttgaccgacatcgttttccgattccccagcaccgtcacctccgtctccctgaccgaccccacgtcgaacaccggcatcagttggacgggtgctgcggacagtgcgaaacctctttacatcaggcccgacatcatgcgcgcatggcgttccgactatgcgaactcctggactccgaccggcacggacgtttccaccggattggattatccggcaggcggaatcctgcaggtatggcctgacatttacgaactgtacagattgaaggtcaccgccacgggtgcgacgggagatgcgctcatgcatgtgcgtcgcgcatggtggtgatgggaaggcacttatgaagaacctctccatccgtttgaaggcgtacaagccgaacggcgacactctgggcctgctcccccagccatcctcgttttccgcgagtttcctgcacgatgacacgggcgctctccgcttggagtattcccgtaaggcgttgaatgggtcgattctcgaacgcaagctcgaaaccggtctggaaatcgcggtcgaagtgtccgatggcggaaaatgggcggaaccattgaacggtcgtttcgtactcatctcccgcagccgtgacgccttggattcatcggataccgtgacgttcacctgcccctcctacgcatggcttttgaacaaggcccttatgctcgacctcaatcatctggagggcgacggggatgataagggcaagcgcgtgttcaagaaggccactgccggtctcatcatgcgcacgttcctcgatgagaacaagacccgtggcggtattcccgtcacctgcggtttcgataccggcaaggattcggctggcaccgtgtggaagagcatcatgacgctcgcctacacgccgggcatcagcagtctcaccgcgttggcgaatctcgccagcaacaagatctgcgactgggctttcgacaagcggacattgaaaatctggaacatggattccacgggattatgccgtgacctgagccgtatctccgtccaattggcacatgacgtgctcgaagccccggaagaggaaagcattgaggctttggcctcgcatattctcgtgcagggcgataacaacaaggccttcacacgggataatcccgcagccccttccccttggggcaagtgggagacgtatctttcccagcagggtatcagcaatgacgacaccgccgccttgtacatgcagtccactctggatactgcggcgcgcgtacacggacagtacacgagggcgctgcgtgtcaatgatgcgccgagccttcctcttgtcgattaccgtccgggtgattggatcaccgctcccactgtcatgcatggggagaaggtgcgtgtccagcaggtcacgttgagcttggaatccaatcagttcaaagcttcggtcgtgttgaacgacaaggtttacgatgcgaccgtccgtcaggcgaaacgagtgcagggcatcaccggtggcgccatcaacggcggcaccggtggtggcctgcccgctccggaaaaagaccatcggacgccgaaggccgtgactggtcttgtggtgcagacggacgcctatatctccagtcgtggtaccgcgttgggtttggctaccttgcagtgggctgcggtctcgcaggcgacggataatacggccatcgatatcagctcgtatcgggtcgaataccggaagaatcttgcgggtgccccgtgggtttccggtggggtgacggacgcgcagcggttgacgatcggcatcggcgggttggaatgcggcgcacgctatgagttccgcgtgcgtgcggtgcccacgtacagcgacaggctgggcgaatggtcgaacgtggtggtggccctcgtggcctcggatgtgactccgcccagtattccatcgaagccgatcccgaccagcaggtatgggatcgtggacgttcaatgggatggcaggaacaatgtcaatgcggggatggaaccggatttcgaccattgcgagctgggcgtcagtgaatcgaacggcaactggcagtaccgggattcggtcgctcgtgacgggcattgcatcgtcaccggcctgaccgcgtacaagacgtactggttcgcgttgcgttccgtggaccgttcgggcaacaagtccggctggtcggcgggtgtgagcgtggtcgtgcagtcggcggtctcgccggaagaggtcgaacaaatccagcaggatttggctgacaacaagacagcgtcgaaggacaatacggccaagctcgaccaggcgcggaaggacatccaagccaacaagtcgaatctcgacacggcgaatcagacgctcacgcaggcgcaggccgatctgtctcaggcccggaaggacatcgcgcagaccaaaagcgacctgaccacggcgaacggcgagatttcgaaggcgaaggagtcggctgcgcaggcgtatgccgaagcccactcgaagaaccatacgtttcgtgggcctgacatgccggacgcctccaaagggctgatcgtcggcgacctgtggctcaagacccagaagtattggacgcgctggcagggcgagaagaacaattcgccgtccatgctcgcggacttttacacgtactggcagggaacgccgaacaattcgccttccgtgctcgtgccgcttgctgaccgcgtgatcgatacgcttgtctgggatggctccgcgtggaaccacatgggttatgccgacgtggaggacaatgcgaagcagatcgagcaggctaagtcggatatcgcggacaacgcggcgaagaccaccgacgccaagaaggccgccgagaatgcggctgccgcagcgaaaaacgcgcagggcacggctgatacggccaatggcgcggccaagaccgctcaggacaccgccaatgctgctactgccgccgcggagagtgccaccgcgaccgcaggtcaggccaaggatgccgccaatgccgcccagaccgccgccgaaagcgctaagaagacggctggcaatgcgcagactctggcgaatacggccaatgagtccgccaatgcggccaagtccacagcagtcaatgcttcgagcgttgcgacgcaggcgaaggccaccgccgacagcgcggcacaatccgccacggacgcggcgaatgccgcccagaaggcgaatacggctgctgccgccgccgctggcgtggcaaacggcaaggccgacgtgctcatccagtccactgctccggatgcgtcgatgcgcaagtccacgacactgtggattgacacgacgaatggtgcgaacacgccgaaacggtggaacgggtcggcttgggcggcggtgaccgacaaggccgctaccgacgcggcgaacgccgccgtcaaggcgaatgatgcggccaaaaccgctcaatccaccgccgacaaggccgcgaccgccgccgccaacgccgcgtcacaggccaatcaggcacaagccgcagccaagaaggcacagaccaccgccgacggcaagaacctcatctaccgtggcccggacgaacccgcgcatgatgggttgaagccgggcgacatgtggtggcgcacgcagaagtattggacgcgctggcagggggagaagaacaacagcccctcactgctcgcggacttttacacgtactggcagggcgctccgaacgcttcgccgtctgtgctcgtgccattggccgaccgcgtaatcgaagtgctgacatgggatggtacccgcttcacgccattcgaccttgtggccaataacattctggctgctggcacggtggccgcgaagcatctcgccgtggattccgtgactgccgaaaaggtcaagaccaatgcgatcacggtggacaagctcgccgctaacagcgtgaccactgagaagctggtttccgacgcggtgaccgccgcgaaactcgccgctgactctgtgcaggcgcgcaacatcgtctcgctcgccatcacgaccgacaagctggccgcgaactcggtcacgaccgcgaaactccgcgtgacggaggacatgaccgtggcgctcctgaatgtccataagattcaggcgggcgacatcgtggctggtgcggtcacgaccgataagctggcgaccaacgcggtgaatgcagataaattggctgctaattcggtcaatgcgtcgaagatagtgtccggtgtgatcaccgccgacaagttggccgcgaacagcgtgacggctgtgaagatcgcggcgggcagcatcacgacggacaaggtggcggcaggccaattccggggctacgtgttcaccggcgcgatattccaaagctccgacgccgagaacacgggagtgaagctcaattcgacagccctgcaaatgtgggattccaaccacaaccagaccatctacttggatggtgagggtaagagcaatctgctgaccggcacgttccagacgagcctcaccggacgtcgaatcataatctcaccgacgttccgccagacgactgtcggcggcgatgacagtaccgaaggctcaggcatcaaattcgcacacgggcgcgacgggcgcgacgcctacatcgcgtcggaatccagaacccaatccaaaggcgaagtctccaccatcgtaatcaacggaggccggttgaccgacaccgatccggggtcgttcatgcgtttgggcgaatacaaggctgcggacaacgccaccaaaatcggcaacgtcctcctagccgcttaccgtgattattccaaagacagcggttcctcgcaactgtccttgatcgccgacccgacggccaaatacaatacatccgccgaactctcagcggcagatccgaacggcaccgtcggcgtacaggcggacatcaactccgggtatctgtacctcggcgggttcctcggccggcttggcgcggggcgcggaacgttccagacggtctattttcgtggcggaataatgagcggcgaagggtgggtgacgcagacgtgcacgtatggcgcaccggccaaatacggtttataccatgcgcatgtctcctccgacgccatggggtcgatcatggtcggctcgaacaatgattcggcgagcggctgcggcctgtgggcgcgtggcgtcggcaacggcgtcaacatcgcatacggcagtcagatactcgccatcctggccaaacagtaggaggcgtgatggaagcgaacatctacggtgacgtgttgaccgtgaccggtgacgacgggacgggccacatcatcccgttggacgcgatcgcctcgtggggcgagcttctcggctgcgacacggacatggaaacggtcgcggcgatcatacgggtgcggtcgaacaggtcagacccgggcgtcatcgacccggccaccggacgcaacgcttggaccagcgcctacgagcaggtggagcgcgacgagttggcggaccgtcagcagacgcgcatggccgcgttgcatcccgtgctcacggcgtccggcgcgttgtcgccggacggtcgcgaggagacccgtcgcctgctcggattggacgcgatgcccgtcatggaggatgcggacggtcggctcgccgacacgctggccggtgtggccgaccgcatcgccgtggcgcgcgaccggttccgcagacgggcgatcgattatctgaccgaccgtcggcgttgacgcgggccggacggacggccacgcgcatcgactccgccgggatgaccggcgaaaaaagggaaacaacacaacagcaaaggagtaatcatgacagcatctgacgtcacgcaatccggcgcgcgaccggcggcggatggcgtgctcgacctgcgtccgccgaaggaaagcctgaaagcggaactctgccgcctcggactcgaatattccagcacggacgcggctgacgttgaatcgtggcgtgactatcagcgtggcgtgcttgcgacgttcgacggtgacggcacatccgtcaaggtcacggatgttaagacgaatctcggacgcactttgacgctcgaagagcttaaggccgtgactcgcatcgacacgatgaccgccgccgactaactcgtatttcccagttttttcaacccctgtaatccatttccggattacgggggtttcgcattccaaaggagacactttgactcagattccagccgacgcgaacaccgtcatcgaccagctctcgcaacagatcggcacactcaacaagcaaaacgcaatcctgtccagccagctcgcggcggccatgaaactgattccgcaggatgtgctcgacagtctcgacaaggaggacacgaatgcagaggattaaccttttccccgacccgaatatggctaacaccattttccaatgcataccagcacgatgcaccgtggattttccgaccgtcagcggattccgatggctgcgtgccacgaccagcggcagtggtgacatatacgcgcaatacgtgcttgcgggagccaatcttccaccggccggcgtgtatcacattcacgcggtctgctatgcgcgagactccggcgcactcttccgcgtctatgcgaacgtcggcaacgggttcaccatcctgcacgagaccggcatcgcagacaatcagacgaagggaattgacgcggacatcacgattccagccaacacggagcgattgttgatacgtgtcgtaccaccgtccacggtcggcaaattcatactgattcgcgacatcctcctcgaatccaagtccacttggcagattctagtggtggttgcaacacctgaggtttgagcggccttccatggtcatgttgtcggttgttgaggttatcacgcggcgtcgagcagttcgatgatcttctcgcttggtttcatgaacccgagggttttgcgtggccggtcgttgagttcctcggcgaccgcgtcgaggtagtcctccgggtagacggataggtcggtgcctttggggaagtactggcgcaggagcccgttggtgttctcgttggtgccgcgctgccacggggagtgcgggtcgcagaagtagacggccatgtccagcgaggcgccgatccgtttgtgcagggcgagttccgctccctggtcccaggtcaggctgttgcgcaggagtttgggcaggtgctgcatcttgtcgatgatggcctgctggacgtgttcggcgtcgtgcccgtcgggcaggtgcagcaggatcgtgaacctggtggtgcgctcgacgagcgtgccgatggcgcttttgttgcggctgccggtgatgagatcgccctcccagtggcccgggaccgcccggtcctcgatctccgggggtcgctccgagatcatggccatgggttcgcggaaacggggtttgcggccttggccgccttggggtctgcgggcggttcgcccctgcctcatggcgcgtttcagctcctgcttgagttcgcccctggcctgcaggtagatggcctggtagatcgtctcgacgctcgcgtgcatatccccattatccgggaagtccagcctcagccggttggctatctgctccgggctccaatgcctgcgcaacccggcggcgatctcgtcccacagtcgcgtgccctcggccgccttgcgcggtttggggcgtttgagccggtccgcggccttctgctgggcgcggtaaggctcgtaaccgccggactcgggattcctgttgcgctcgacctcgcggctgaccgtgccggggtcgcggcccagcaggcgggcgatggcgcggatcgaatcgcccagacgcagacggtccgcgatctggatgcgctcctcctggctcaggtatcgcggatggagggtcttgggtttgtccatggtggaacgataccagtccaccaggggtttctcgttccttcccgtggcgcgcgtcctgccgttgcgccacgccttgccggtgcgtttcgagacgccgaccgcgtgcgcggcctgggtgaagttcatgccttcctcgtccagcaggcgcacgtactcggcgcgtctcgcctcgcacatcagcttcctcgtcggatattcgacgccgttgaacgtccaacggtgttccccgccacggtcttcgtttcggtggcttctggtcacctgaccctccttgcggtaggtcaggtgttgcaacgatcactagaacccgcccttacgacactgccattgggggggcttccgagcttcttcaccggcgacaccatgccgttgcagtaggcgcgactatcgggcgggtggtgcccgatgatggtcacgaacctatgcacgagcccatcctcgaccatcgccctggaagccgacaactgggtggatatcccgaccattccgaaaaagccagggacgaaatatttggtcagcgcctatgtgaacgtcaccggcggcactatctcgatgccattctcctctggcgacatcagtgcaagccaacgtgtcaactacagtatgaccgttgccaatgccggtgtgatgtcaatgagttattccgtcgtgtccggcaatccgaccgtcaccgtgaccagtatgctcatctgcacgtgggccgaatatcaggcgaacaagaccctgctcgacggcatcggatatttcgacggggacagcatgccgcgcgcctgaccctcttgggggtgatggcatgagcctcattcaaaatctcattcccgacccgcgattcaaaaccggaagatggtccacgctcaattcggcagtaacgccgataccagaacatggtgccgtgaacgtgtcgaacacgggcgacaaatgggactcgtttatgcaggttattttgccggacgtgtccccgtatcgcggcgtaagcatgacgtttgcctgctcactcgccgctatcgatggcagtgcgaaggagggcagcaacggcctgctatggatttgggttaacggcaagatcgcgaaggcgtcggacggcgggacggcggaggtcgggcgaaaaaacgtgcaattcacactgccgagcgacgccaccaaactcacattgcgatggtatgcgccgagtgagcgcggcaccttccaatggcggcaccccatgctgacgcgcaccgtggactaccagcggatgctcaacggtatcggggggcagtcgatggactatttcgacggcgacctcatgccacgtccaaactgattttttttaaggagatgtaatgtgctgcaaaattttctagccggttttgggggtgtgggtggcgcgtgcgcgctcatcaccctgctgcttaaagtctggccgggcgcgttggacgcgttggcgaccggcctgtacgcgcacgtcaggccggaacgcttgccttacgattcgccgctgtcgcagcatttcgccaagacgcgacaactcggcgaacgcaccgagaaattcgacgaccgtatggacgagctctgccgtgacacgatcaaaaacacgatcatcagcctgatctacggcgacaaggacaccgaccacagcgaggccgtcagctacgagctgtcgaagcttgagaaattggacgcgcaatgctggatcgtcaacgcagccgaaaaatatttggaggaccggcaatgacgcatctcatgatcgcaggctgcatatacctgctgctgctcgcgctcatcctcgtgttcaatcatggcgcgcacaggcattgattttcacaccggttttcaaagccatcccattccggggtggctttttcattgacggccccgagtgggccgtgacaatcctgacccacgaccgtgggccacaaacaacaatccatcccgagaaaggggacatatggtcaataacaaggacaagccgaagccatggcataagcgcctgttcgccaaggtcacggcactggccgccgccatctgcatgatgctgcttccggcgaccgcgcacgcggacatgcagggcgtggacatgagcaactggcagtgcggcgcggacgtgtacaacatgcaggccgattttatcgtggtcggcaccacatggggcacgggacaggtgtacaacaactgtctcgtgtccggtgtgaacacggacgccaaccgcatgatcgcccaagcgcaggcatccggcaagaaattcggcctgtaccattacgcgatgggcggcaaccccgaggcggaagcccaattcttctggcggaatacgtcgaactattggcgtcacggcattgtggcgttggattgggagatggatgataaccccgcatggggcgattgggattgggtacgccgcttcatgcgtgagtgcgaacggctttcgggcggcgtgcgcccattgctgtacaccgccccggtcgccggcaccatcccgcaggacatccgcgaccggtacggcctgtggatcgcccaatacgcgaacatgagcccgaccggctatcaggccaatccgtggatgataggcgcatacggcgaggccatgcgccaatacagcggcaccggtgtcgtcaacacgtggagtcccatcgacctcaacatcttccgcggcgacgcatggcagtgggacctgtacgccaaccccgccggcggctccacgccaccggccacacaggccgcgcccgtgcagccgaacaaccccccggccgacaccaacacgggtggcatcagccacgtcatgcagtggggcgagactgtctggggccttgccgtagcctacaacgcatggcccctgtccgcatggcacacgccaagcggtgacatcaaccgctactacgtgggcgacgtcgtaacctacggcggcggcaccgcccccgcatcgtccggcggggtctccaaggtcctccagtggggcgacaccgtgtgggatttcgccaccgcgcacggttacagcgtcagccgctgcaccgtaccctccggcaacatcaacgtctactacgtgggcgacgttgtaacctgccgctgagattcaacagatgccgtcgtcactcccctgatggcggcatcaccaccatttttttgatcggagtaaaacatgaccgacaacacgccggacacccaactcgaagaaaccacggaaaccggcacgcccaatattcccgaccatacggccacgccgtacactcccgtattcaatgacacggtgcgcaccatcatctacgtggtcacgctcgtcgcctcggtcatcggactcgggttcatgagcttcggctcccccgaaatcggcggtttcatcagcaccgccgcaggcatcatcgccgcaggattcggagtcgcatacaacccggtacgcatggccggcaagtagtcgcagcgaataaataccaccgcccctccccagcagtaatgctggacggaggggcggttttcgcgtattgcgatataccggcatggaggtacgggctgtcacgtatactgtaaatgtcatttatggcccggtttccgaacagtcacccgctggtgcgcgtgccatcccgttcatgggaggataggaagccgggccatattgctattgccattcaaaaggcgataatattttaccgttcctcatgtccccaagcattcccttgcataggcttcaacctcacttgagatatttgacccatccccgataggtgacggcatgagcggcctcgcgcgcactcccatacacctttcgaccccggtcgaaataatgcaggtgaaacatattctgattgaaccaatcacaattgcagacatgccagtcccacttgtcgccggtctcccacaccttcaatgcttctttaatatccggctcgtaccggtcattgaatacgagctgccacatcgtaggcatacgccatacactcggtttgaacgcatacagccaaccggcttcaaccagtgttttcaacgccttgcgtacatgctccgcttcgctttcgggcaatcccattttctccgtcacccatgtcgcgtaaccgagatagcagcggggaggaacaggcacgatgtcatggcatgaaccggggccgttggccgtatcgggaacgtccctgtatggtggcctgttttgagggtctggcgtcatatcgcataggcagtcgaaaacgtctcgttcgagactgtttgccgagtcgatgaaaaacgattccgtctggaagagtttggccgcgtgacgcttgttctggtatcccattactgctcctctcctaaatggaaatattcccttgcttgtttttcggccagaagattctccgtgggcgtgcctagacagagcagccatatcgcgttcttctgctggaacacgttcgccggcttcaacagtttgagtatgccccgttgttgcatgaatttggcggcgctgccgatacggttccatgccgtcctgcgtcgcttcggcagtccctccgcgttacgccggtattgttcttcgctgattagttccgggtcgcttgtcggttcataatcgggcaacgtcattcccagatcgtccatagcgtcattccaaccgccccaatagcaccagtagggtttctcccctttgtgtactgcttggtcgtttggcccgcacgcacgtaatgccatgtaggtgagcagtgagagcgcgaaggagtccgtgacgcgcttacccgagttgagtttggataaagcaccctgggagactttctcatacactctgtccatgttcttgtatcccacgaacttcatgcctttcctccatgtctcgctgtaggctgggacatggaacgcctgttccagaaacccccgttttgtttgatcgctggcgggggtttcccttttacacactcagaagtgtatcacatacacacgtcactgtgtaacctgattcacagttcagtggggatatatactacacactcagctgtgtatatatataaagtaactaaatctcttatatataaatataataaaaacctgatttttgattttttgattttttcgagcgaatcaccgtcgatccgccacgccgatacccgttttccaattcaatccgcaagtttgttggagaatgttggagaatgacattcctagataccggaaatcttacccaagatacaacgagaccccttgcaaacattggcgttcgcaaggggtctcaatgcctaatcagcgagtgattcagcacaccttccacatccagttgtgcgggtcctcgacttcgccgagctggatgccgagcagctcgtcgcgcagttcgcaggtgagcttgccggagccgccgtcggcgacggtgacatcgaacttctcggacttgaagcgaccgatcggggtgatgatggcggcggtaccgcaagcgaacacctcggtgacttcgccggacttgatgtcctcgagcagctggtcgagggcaatcatggtctcgactacgtcgtggcccttgtcctgcagcagctgaatcagggagcgacgggtcacacccggcagaatgttaccggtcagggacggggtctccacgtggccatccttgtgcacggccatcatgttcatgccaccgagctcttcgaggtaggtcttggtggcggcgtccacgaagcacacctgctcgcagccattctcaacacccttgtactcgccgagcagggaggcggcgtagttgccgccgcacttggcgaaaccagtgccgccagggccggtgcggaaccacttgtcttcaacccagatgctcaccggcttgacgccgcccgggaagtacgggccggacggggaggcgatcacgcagtagtcgacctcctgcggggcgcgcacgccgaggaacggctcggaagcgaacatgaacggacgcatgtacagcgtgtactcgcggcgggacggcacccagttggcgtcgcgcttgaccagcgcggccacggaaccgaggaagtcgtcaatcggcagctcaggcaggtacagacgcttggcggagttctggaaacgctcggcgttcgcatccgggcggaacagccaggtggagccgtcggcatgacggtaagccttgaggccctcgaagcactcctgtgcgtagtgcagcacggaagcacccggatccatcttgagcggtgcgtacggttcgacgcggcggtcggaccagccttcgcccttggtccaggtcatgtgggtcatgttgtcggagaacacctggccgaaagccggcttgtcgatgagggactggcgcttctcatcggatgcggggttgtcgttcggcagtacggtgaacggttcggcaagcttgtcgagcgctgccggatcgtggtgcgtgttttcagtcattactagctacttcttcttgactttggcggcccgaaagccaccatatggggtgtgtgctgtgcgcttgtggcgcgagctctgttgcatacttttgcacacccatgtgttactcgtgtggcagagttcacatggtgaaaaaaacgaagaagcccgcaccgttctcaacggctgcgggcttccacgtttcagttatgttctgaattgttcgctatcgaagcgatcgactcacttggcgtcggcagccggagcagcagcgtcggcagccggagcagcagcttccggagcggcggtggactcagaagcatcttccggcacctcaacggtgacgacggactcttccgggtcctcaacgtcgagctcaacgccttcaggcagaacaacgtccttagcgaacaccttggtgccgtcggttaggccctcgacgctcacaacgatcttctcaggcaggttggcgacgtcagcgcgaaccttgagctcctgaatgtcgacgaatgccacagcagcgcccttcggggtgccttcaacgaagaccggcacctcgacgtcgatcttctcgccggccttgacctcaaggaagtcaacgtgctcgatgatgcgcttgaccgggttcttctgcacgtccttgacgacggccatcttggtgttgccgtcgaaggcgatggtgaacagggcgttggtgtgacgcagggccagggtggtctcgcgcatcggcaaggtcacgaaggcgggctcttcgccgccggcgtagatggtggccggaatcttgttggcaacgcgcagacgacgagcaacgcccttgccgaactcggaacgggcctcgccctcaagcttaatggtggtagccataatggatactccttgtagtttcgtttcgtactgtctcgctcagacgccacgacgcgccgaaagacaccctacaaggagtgaaatacgccgagtcgataacggaagctgtgtcatgtgtcagcacgcacacttccctcgccaaagcaacaattgtcaagtatacgccaactccggactttgcgtggtgatgcttcaatgacactgcatcccggccgtcccagccacgtcatcgtacggtttccgcgaaataatccctaactttgtgaagaacgtacgcttacccgttctcatcgtacggttttcacgaaatcgtccgccatttcgtgaaaatcgtacgctcagcgacactcagtgtacggtctttcacgaagttggggatgatttcgaaaataacgtacgatggtgagtaccgtatcgggaggttgatatgactcgttcggacgacgtcatcaatgaggatggccatgacgtcatcgccgcacacactcacgttgtcaggggtatggctgcggcacttgccgcgatagccgccacaggagccggcgtcacagccgcggccgccaacgtcatgttcacgttcgcgctggacaccaaggccaaacgttcgatgttcaacatgccgcacgaggagacaccgaaaggcatcgaattcgacatgtccgagcagcttgagaccgcccggtggttcgaggaggccaagcaatcggtcacgctgcgcagccatgatggattgaaactccacggctggctgttggacccggattgttccgacccacagccgcatctatacgcgatctgctgccatggctatgccggagagcccgcggaaatggccaaatgggcgcatcgctatgcgcaactcggttttacggtcctgctacccgcgcagcgcgcccatgagttgagcgaagggcgttacgtgggtatgggattgctggaaagcgatgatctgttgggctgggtttcgctgatcaccgcagctgatccggatgcacgcattctgttgcatggcaattcgatgggcgccgccacggtgatgatggcggccggcgatgcgcgactcccccgcaacgtcgtcgccgcgatttccgattgcggatacagttccgtggtctcgcagtttacggataatgccgaggcgatgttccgtttgccgcactcgttggctgtgctgctggtcaaagtggccagtcatgtgtctgaacgcaaggctggataccggtttgaggacgcctcctgtgtgaaggcattacggcacgcgactattccgatgatgttcattcatggcggagcggatacttttgtcaatccgaagtatctggacatcaattacaacgcctgcgccagcatcgaccgcgagaagctgctgattcccggtgctgatcacacgatgagcgccagcaccgacccggagcgctattggcgtcgcgttaacagctttgttaagcgggtgtttgggttgtagtagatatagagcttggctcccctctgtgaggggagccgccagcgaagctgactgaggggagcacccgcgtatgggctactcccctcagtctcactccgtccgacagctcccctcacagaggggagccaagaatggttacgcgagcaattccttgacggcggcgatgacggactgcagactcttcttcgcgtcgccgaacagcatctgggtgttgtcttcgaagtagagctcgttctggatgccggcgtagcccataccgcggccgcgcttcatgaccacgacgttctgggacttgtcgacgtcgagaatcggcatgccggagaccggggtgccgggacggcgagcagccgggttggtcacatcgttggcgccgacgaccagagccacgttggcctgcgggaactgcgggttgatctcatcgagatccacgagctcctcgtagggcacgttggcctcggccagcagcacgttcatgtggccaggcatacggcctgcgaccgggtgaatggcgtaggagacttccacgccgtggcccttgagcagttcgccgaggtcggcgagctcgcgctgggcctgagcctgagccagaccgaagccgggcacgaagatgaccttctgcgcgtagacgagctgaacggccagatcgtccggcgtggtctccttcatggtgccttccggaccgtcgccagcagcggcggcgtcagcaccaccgccgaagccaccggccaagacggagagcagcgggcggttcatggcctgagccatgaggatggacagggtcacacctgcggaaccgacgagtgcgccggccacgatcagggcaacgttgtcaatcgccagaccggacatggccacagcagtaccggtgcatgcgttgagcacggagatcaccactggcatatcagcgccgccgatcggaatcacgaacaccaggccgtagcacagggcgaacacggtggtcagaatcgaccacagcaggcgctgttcgggctggacgcacagcataaccagcgaggcgacagacagcacggcgaacagaatgttccatacgcccttgcccggcaggttcagcttcttgacccacttgataccctgcagcttgccggcagcgatgagcgagccggtgaaggtcacagaaccgatgagaataccgagaccagcggtgatgagcaccacgatgtccggggtgccttccttggtcaggatgtcgttcagggccacgagtgcggcggcgccaccacccacggtattgaacacggagaccagctgcggcatatcggtcatcttcaccttcttggcggagacgacaccggccacggcaccgatcaggatgccgacgaccagcaccaccacggcgacaatgttcacgaagcccttggcgaagagcacgatgaacgccatgagcacggccacgaccatgccgaacgcggagatctggttacccttgcgggcggtcttcggcgaattcatgaaatgcagaccgaccacaaacaggacggcggagaacaggtagacgaaccatgcgacgatgtcgatggcgccaacggttgcggaggtcattacttcgactcccccttcttctcgttcttgctggacttgaacatctcaagcatgcggtcggtgaccacgtagccaccaacgacgttcatggtgcccagcacagcggccaggaagatgaacacgtaggccagcgggctattggcttcggctgccacgatcacaacgccgacgatgacgatgccgtggatggagttcgcgccggacataagcggcgtgtgcagggtggcgggcaccttgccgatgacctcgatgccgatgagcagcgcgaggacgaacagggtaatggaaacgacgagagtaggcatggtattccttcttccttacttctcggacttctcggcatcggcagcagctgccggggcggcggcgcggccggcaaccaccagcgcgtcgtcaagttcttcggtgagatcctggccgagcttgccgtcacgcacgaagtgcacgaggatgtcggccacattgcgcgaaagcaggttggatgcggtggtggcgacgccggaggccaggtagggagcgccaatcagcttgacaccgccctcggtgacctgctcgccgacggcggagccctcgacgttgccgccgaggtcggatgctgcgcagtccacgatcacggcaccacgcttgagacccttgacgccggctgcggtgagcagcaccgggggcttacgacccgggaccttggcggtggtgatgatgatgtcaaagccggcggccttctcatcgacggcagcctgctgctgagcctgctcttcggcgctcagcgcgcgggcataaccgccctcgccctggcccttggagaagtcaagtcccagatcaaggaacttcgcgccgagggactcgacctcgccctgggaggcgggacgcacgtcgtacgcggtgacgaccgcgcctagacgcttcagcgtaccaatggcctgcaggccggcgatgccggcaccgagcaccagcgccttagccgggcgaatcgtgccggcggcggtggtcatcatcggcaggaaggaaccgtaagcatcggcggcggtgatggctgccttgtagcccatcacggagttctgagaggtcatctcatccatggactgggcgctggaaagcttacggggcagcttttcgatggcgatgcccaccagaccggccttctcgagcgcggccatgtaatcggcatcggtgaaggaaccgagcatgccaatgacccactggccggccctgagcttggccacggtctcggcggacggtcggtccacaaaaccgagcgcgtcggcttcggcgagcacctcgtcacggctggtcaccttcgcaccggccttttcgtaatcctcatcggtgtagtcggcagcaatgccggcacctgcttcaatcagtgaggagacaccgctcctcttcagccgggtgacgatatccggcgtcagcgcgacgcgggattccgtttcggacgtttcgttcaaaacgccgaacaccacggtggcttctgggttttgcgccatgagagccctttcttgttctacttcaaaatggacatggttatccgcatggtaagtgtagtcgaaaggtaaagaccatgacttgagattccgccaatcgaaatagaaacgaacccgaaattagtaagaaatacgaatgtgtccatgtgcattgcggatgaattgctcggaagccgtccaacaatcacccggcatcgatcagcaaccaaccgctcaataattatcgacaatcgccgtttcgcagctcacggttactcaacaatatcgggacctgtgcaatattttgccacgcactcccctaacccgccagaatcctacggttgcgtaaggtgacgagttcggtttgggcgattacaatttgaactttgagaagcgttcgcctcatggctggacgacactgaaaggtttacaggagcaagacttgtcggttatcaattccttcacgcagcacacgatcaatctcacccgtaaggcgctcaggttgggatccgacttcgtccacccggtccacgacgacaccccggacgagcccgattacctgtccaacgccgacgtgccggtcgagaccaatatcgctttgcctcacagcgacgattgggacgacggccacctgaccgtcaccgacatcgaccccgccaccggcctgctcaccacctccaccgaaggcaatccgccgctggacgaaggtacgtccatctacgacctgtatgcggaccgcgccgaacgtatgggcgatgagccgctgtacacctacaagtccggcaacgattgggtgaccgtcaccgccaacgagttcctggctgacgtgcgtgccgtggccaagggcctgattcattacggcctgaagaagggcgatgccgtggcattcatgtgccgaacttcctacgactgggacctgaccgacgcggcgatcatggcgtgcggcggcgtgctcgccaccatctacgacaccgattccgccgagcagattcgcaatatcgtcaacaactccgatgcccgactgctgatcgtgcaggacacggacatgcgtaagaaggcggatggggccgtcgaagagtgcccgtccctggagcacatcatcaccatcgagaccggtggcttggacgagatcaaggcctacggcaccacggtctcggacgaggagctggacgagcgcatcgattcggtcaagaagaccgacctgtgttccatcgtgtacacctccggttccacggccgcgccgaaaggcgtggagatgacccacgagcactactgccagaccgcgctgaatctgccggcctacatgcccgatctgctgcacgacaagaggaacaccatcctgctgttcctgccgcaggcccattccttcgcccgcgccatcaactacatcgtcgtctcctcgaacgtccgcatctacatcgccaccggcatcaagacgctgatcagcgatctgcaggtggccaagcccactctcatgatcgtggtgccgcgcgtgctggagaaggtgtacaacgccgcgtcccagaaggccggccacggccccaagggcgtggtgttcgcctccgccgtggtggccgcgcagaactatatgaaggaggtctccgccaatggcaaggcaggtgcactgacccgcactcgccgcgctgccttcgatccgattgtctactcttcgctgcgcgaagtgctcggcggtcgcgccaagtggattgtggccggcggtgccccgcttgacccggaactgctggctttcttccgtggcgcgggtgtgcctgtatacgagggctatggtctgaccgagaccaccgcaccgtgcgcgttcagcccgctgggtacgccgttccacgctggttccgtgggcatcgcattccccggattctccctgcgcatcgccgaggacggcgaaattcaggtcaagggtcgtgccgtgttcccgcgctatcacaagaacgacgaggccactgagctgtcgttcaccgaagatggctggtatgtcaccggcgacttgggccgtatcgacaacgatggcttcctgtacatcaccggtcgtaagaaggatctgattatcactgcaggtggtaagaacgtctcccccggcccgatcgaggaagtcattcagcgttgcgagttcgtctcccaggcgctggtgctgggtgataagcgtccgttcatctccgcattggtgacgctggacgaggagtcgctgcgcccgtggctagccgccaagggcctggacgagaacatgccgctggaggatgccgccaagaacgccgccgtgcgcgccgaagtgcagaagtgggtcgatcaggccaacgagggcgtctcccgcgccgagtccgtgcgcaagttcatcatcctgcccgaggagttcactcaggaaaacggcctgatgaccgcttccatgaaggtgattcgtcccaaggtcatcaagcgctactccaccctcctcaacacccagatgtacacgaagcggaagtaaaccgtatagcaaaagctccctctgacgagggagcttttttcgtctataagccttagaagcccaggcgctccagctgcttggggtcggactgccagcctttggctaccttgacgtggaggtcgagcttggctttttggccgacgatgcggttgaccggggtgcgcagcttcttcttgacgtaggtgaggttcgaggcgcccttgccgatgatgatcggcttctgggagtcacgctccacgtaaatggacacgttgacctgcgccttgccgtcatagccctgaccggtctcgttgtcttccggatagtcgatggaatcaaccaccacggccagcgaatgcggcagctcgtcgtccagggtctcaaggaacgcaccgcgcacgagttcggcgatggtgtcttccggacgctcctcgctgatctgatcgtccgggtacatctgcgggccctcgggcgtgtgctcaatgagcacgttcttcacttcagccagattgtcgtgcttcagagcgctcaccggcacgatgtccgagaaatcggcgaaatcgttgatttcgatgagcttgttgatgagttgctgacggccaagctcgtcgatcttggtgacgatggcaatcagcgggatgcgccacttgaacgtaccgtcctcacgcttggtggcgaagtcggtacgcagtcgggagagaatacgcttgtcgccggggccgatttcctgatcggcgggcagcaggaaggccaccacgtccacatcggccagagattcgtcgaccacgtcgttcagacgctggccgagcaacgtacgcggacggtgaataccgggcgtgtccacgagcacgagctgcgcgtggtcggcggtcaggatgccgcggatcgccttacgggtggtttccgggcgagaggatgcgatggcgatctgcttgccgatcaacgcgttgatcaacgtggatttgccgacgttcgggcggccgaccacggccacgaatccggagcgatacggcacgtcctgcttggtcacgttcgccgtttcaccggtcgcgtcgacttcggcaacgccggcaacatcggaagcatcggtaacgtcaatgtcatcgacgtcgttcgtgctgttgttctgatcggtcatatcactccttgctggcggtatcatcgccttcgacgggctcgccgtcagtttcctcatgggtcttgttattttcctcgccgccctcgacgtgcgccggttctacgacgatggtggacaccttcttgcggcgtccggcggagtccacggcggtcagtcgcagaccgcgcgtcacagccgaggcaccgacaatcggcactcggcccagaatcttggtcagcaggccgtacacggtatcgacatcgtcctcatcaatgtcgatctcgaagatctcctccagatcggcaatcggcgtacgggcgggcatcttccacttgttgtctccgattttctccggctcagtacgctgggtgcggtcgtgctcgtcttccagctcgccgacgatctgttcgatggcatcctcgatagtcaccatgccggcgatgccgccgtactcatcgaccaccacggccacatgctggcgggaacgctgcatctcatggaacaggtcgtccaccggcttggattcgggaacaagcagcggctgccggacgatggattcgaccgcgcgctccatggccgccgggttgaaggcggtggcacgcacggcatccttcaaataggccacgccgatcaggtcatccacatcctcaccgatcaccggcacgcgggagaagccggagcgggagaacagtttcagcgcggaagacagtgtggagtcgcgctccatgcagatcatatcggtgcgcggcaccatgatctcgcgagtcaacgtatcagacagggtgagcacgttgcgcaacatttcggagacttccggatcgaagtcgttggactccaccagtcggtcgatggcggccttgccctgctcgagctgaatcttctcaagctcctcgtcgtcggacagatcggagtccttggagcggcggcccggtcccttggaaccggacttgtcgccaccgatgcgtgcgaacggcgtgagcttggtggccaacgacacgatgcgcgagttggaaatcatgatgccgaccggcttggccatgccggcggtgcgcgggcggaccagtacggagaccacggctacgataatcgcgaacaggaatccggagagcagttcaatccacagttccgcaccccacagggatgcgatggaagacaccagtacgccgtcgagcacattgcaggcgatgcggaagaacgcacagctgccggcggtggcgtaacggtcggcgatgagccgttgcacgcgatgaatcttgtcgatcttcttcatcttgaggaactggcttgcttcggagtcggtctgcacctcgaggatgagattgttaaggctggctcgcgttacgcgggccacggcgccttcagcggcggccatggtcagcgagagccagacgaacagggccgccacgagtacaagaatgacggtgatggcgatcggcgtggtactggaatactccataatgatttttcggtgtccttgaatgtccttgaacggtatcgaataatccggatttggtgtgattgatttgggagcttatttggaatcgaggtcgcggccagcaccgtgcgcggcgtcgtacagggccagcgcgtcgggtgtgccggcgggcagcgtggcctgcacgttggcatcgtggcgtagggcgaagaaggtgagcagcagctgtcgctgcaggccgaacatctggcgctcctgctcgggggtcacgtggtcgtagccgagcaggtgcaggatgccgtggatggtgagcaatagcatctcctgcatggtgctgtgcccggctgcggcagcctgttgggcagcgacccacgggcagatgacgatgtcgccgagcactccttccatcacggttttgccgtcgccggggcgcagctcgtccatcgggaagctcatcacgtcggtcgggccttcgaggttcatccaacgcatgtgcagttcggcgatgggatcgggatccacgaacatgatggtcaggtcggactgggtgctcacgcgcatctggtcgagtacccaaatacccaaatcggagaagaccttggggtcgatgacccactgggtttcattggtgacgtcaacgctcatcgtctgtctcgctttggttggttgaatccgcttgctggcgggcatcgaagtcggtatggttgcggcggcccttgcgttcgatgtcgcggtggtcgccggcgatggcggagtgacggtcgtaggcggccacgatctgtccgaccagctggtgacgtaccacgtcctcggttttgagatgcacgaatgcgatgtcgttgatgccgcccaggatgcgttcgatggtggccagtcccgagcgaggcacggtcaggtccacctgcgagatatcgccggtgatgaccatcgtggtgttgaagcccagacgggtcaggaacatcttcatctgctgttcggtggtgttctgagcctcgtcgaggatcacgaacgcgtcgttcagcgtacggccgcgcatgtaggcgagcggcgccacttcgatggagccgtcgtccatgtaccgcttgagctggtcggcgccgagcatgtcgccaagcgcgtcgtacagcgggcgcagatacgggtcaaccttgtcattcagcgtgccgggcagaaagccgaggctttcgccggcctccacggccgggcgcgtgaggatgatgcggcgaatctgcttgtcctggaaggcacgcacagccttggccacggccagatacgtcttgccggtgcctgcggggccaatgccgaaggtgatggtgtgcgattcgatggcgttcacgtaggccacttgtccggcggttttcgcacggaccggcacgccggcagcaaaggtgatgacgccgggaaccgtgggcttgcggtacgtcgggtcgtgggagccggcagaacgtgcatgggcgcgttcgtttgaggtcgattgcgccagtttgtcacgcaccgggccgtgaccgggatgttcgaggcgcacgtggttcttgagcacgttctggtcgagcatgcgacgcacggtgtcggcgtccataggcgcggtgtaggcggcttggatgatggtattgaccaaatcctcggcctgtgcggcctgggcttcggtctgcttggagcgggagacgatcgccacgcggttgccgcgcacgataatcgtcaggtccggaaaggcgcgctctacctcgcgaatgacctcgtcaaccgggccgagcacggcgacggggtcaagttggggcgggatggtgatggtacgtgtagtcgttgccacgaagcggatattcccctactactcgtcgagcttttcgccggtcatcacgtgcgcgtgcacgtggaagacggtctggccggcgtcgagaccggtgttgaacaccagtcggtaggcgccgtgaaattccttgtcggcgatgttctgcgcaatggagacgatgtgggccagctcggtcgggtcgtcggcggcaagttcggcgacgttggcgtagtgcttcttgggcaccacgagcacgtggaccttggccttgggattgatgtcgttgaatgcgtaggtcgtctcgtcctcgtagaccttgctgctgggaatctgccctgcgatgatcttgcagaacaggcaatcgtcggattcgctcatcatgctccttggtttgatgttgctacgcaccagcttagcgcgtgggcgttactcgtaacgtcccaacacccgagacaacagcgacaacgctacaggaccggccgtcgcggctctcagaatattgcgccccagtacgcagctcaccgctccggccttgacgaaatcagctacctcctgctcactgatgccaccctcaggcccgaccaccacactgacagtccgcggccggccgtcctggagcgtgcgttccaccaactgcgcaaccttctcctccacgccggaccacgtatcggtagcatcctgatgcagcacaatcaccacatcgccatgcacgcaggccctgcggcagatggccacgacctccttgctggacgcgcacgcctccagttgcggcttaaaggcgcgccgcgactgctcggtggcggcatccagtaccgaattccacttcttgtctgtacggccgaccttccacttggcaatggatcggtccgcctgccatggcaccacttggtcgacgccaatctgagtagccatatcgatggcctgctcatcatggccggttttcgccaatgcctgaatcagcgccaaacgggtgagcggctcgggttcgcgccccacttccacgacttcagccagtccggcttcaggatcggccatcactgcctggattctcaagccgttgccgtcggaaagttgcaggctgtcccctgccttgagtcgcatggcctgcacggcatggcgcttgatgtgagcgggcagggttagcttccagccggcgtggagttcgtcgctgttcaccgggacgtcgtcgacctgcgggtcgaaaagaaaaagggcatcagtcatgacttcaaggctacacgcgacacgccgggcacacgcgcgaattgcatccctgtaatttcatgctaagctatctactcgttgtccaaacgacacctgcccgggtggcggaatggtagacgcgctagcttgaggtgctagtgcctattttatacaggcgtacgggttcaagtcccgtctcgggcacagataaaccccttgcattgcaaggggtttttcgttatctgcacacacgaaaggccaccaatgcagttcatcacgctggacaccgtcgacgacccgcgcgtcgaagcgtatgtgagcctcaccgaaatgcagttgcgtaatcgcttggaaccagccaagggcgtgttcatcgccgagtcccccaaggttatcgaccgcgcgctggccgctgaccgcgaaccgctgtcactgctggtcgaggaaccttggctggagggcatgaaagacaccttcgacttcatcgacgggcgctggggcgcggatattcccgtctacgtggcctcacctgagcagctcaagcgtctgaccggctaccgtttgcatcgcggtgccctatgcgcgatgcgacgctggccgttgccctccgtagccgaggtctgcaagagcgcccgccgcgtggcagtaatggaaaacatcgtggaccacaccaatgtgggcgcactgatgcgttcggcggccgcgctcgatgtggatgccgtgctggtcacaccctcctgcggtgatccgctgtaccgacgcgccgcccgcgtgtcgatgggcaccgtattccagattccgtggacccgtatcaccgggttcaacgacgacggcaccgaaaacaagcattactggccgttccagggcatcgacgagttgaagtcgctgggcttcaccaccgtggccatggcattggaggatcgttcgatttcgttggacgaactgacacgccgtctgcacgcgcctgccgaagatccgacgcatatcgacaagctcgcgctgatcttcggtaccgagggcgacggcctgtcccaccatacgattgcccgcgccgatttgaccgtgaagattccgatgagccacggcgtggatagcctgaacgtggcggcatccagcgcagtggcgttctacgcgacacgctaaggaatcgcacgcgctccgaaaaggccggatccttaacaaatctacgaaactgttcatcgcaagttcacggcacgcgggggcgaaagccttgcatgttcgtttttttctgcaattattaactatgtaaaccgaatgcaaggaagcatccggcccggcagtgcggtgtcgaaagacgctcagtaacagagaggacagttacgatgaccaagaatcccaagattctgtcgattgtgcttgcaggtggtgaggggacccgcctgatgccgttaacccgtgatcgcgcgaagcccgccgttcccttcggtggtgtgtatcgtctgatcgatttcccgttgagcaacctggtgaactccgggtaccgtcaggtcgtggtgctcacccagtacaagtctcactcgcttgaccgccacatctcccaggtctggcgtttctccccgctgcttggctcgtacgtctcccctgtgcccgcgcagcagcgtctcggcaagcactggtatctcggctccgccgacgccatctaccagaccatcaacatcatcgaggatgtccagccggacatcgtggtgatcgtgggtgccgatcacgtctaccgcatggacttcgaacagatggtacagcagcacatcgagtccggcgccgagttcaccgtggccggtatccgccagcccatcgaggaatcgaaccagttcggtgtgattgaggtcgatcccgatcacccgaacatgatcaagaacttccaggagaagccgcccaccaccaccggtctgccggacaatccgaaccagattctggcctccatgggtaactacgtcgccaacaccaaggccctgttcgaggctctggctctcgatgagaaggctgccgacaccaagcacgacatgggcggcgacatcgccccgtacttcgcttcccgcaacgaagccggcgtctacgacttcaactcgaacgagattccgggctccacggccactgatcacgcttactggcgcgacgtcggtacgattaagcagttctacgatgcgcacatggatctgatcgcctatgtgcccgagttcaacctgtacaaccaggattggccgatttacacgatgtccggcaacctgccgccggccaagttcgtgcacgccggccgcgaccgtctgggccacgccaccgattcgatcgtctcccccggtgtgatcgtctccggcggtgaagtgcaccactccgtgctctcccccaatgtgcgtatccactcgtgggcacagattgtcgattccgtgctgttcgacggtgtagtcatcaaccgccgcgcccgcgtgtacaaggcgattcttgacaagaacgtggtgctcaccgagaactccactgtcggcatcgataccgagcacgatctggcccgtggcttcaccgtcacgccggatggcatcacggttgtcccgaagaacaccatcgtcgatgactgattgaccagtccagaagtccagacatggaaaagccccgcaccatgcggggcttttctcgtatagagctccctctgatgaggaagcttactaagcgctatcagtactttggcatgttgtcgaagttgaagcctagggcggcgagctggtcgcggccttcgggcgtgatgcgctccatggtccagcgcggatcccacgtccagtcgatgcggaactcctcgaccagaccggccagcgtggatgcgcattcgtcctcgataaggtcggtcagcgggcaggccggcgtggtcagcgtcatcgtaataatggcgcggcctagctcatcgatctcaatgccgtagaccagacccaaatcgatcacgtcgatgccaagctccggatcaatcacctgatgcagtgcctcgcgcacgtcttcggcagtggcgcggccgatatcgtcaatcgccttgatcggaatctcgctgccatcggactgttcgtcatcctggcaaccgcatttgccgtggtgaccgccacacgcacaggtgtcatcgccggacgcagcagagtgctcgatcgggcgtccgttcgggaagcccttggccaaggccgggttggccatcacgcggcgagcggcctcctcgtcctgcaggacgccgttgacggcatcgaaaacggacggctgtggttcgggaaccaaattatcgttggacatatttcctcagttctttgcagcgagggctttggcgatggagtccttcagcccttcccagcctagcagagcgcatttgatgcgcatagggtatttcgacacgccttggaataccacggcgtcgccgagcttttcttccaggttctcgtcgtccagaccggcaccgcgcgattccatcagcttgtggaatgtctgttccagatccatggcctcgtcaacggttttgccgtccaccagatcgaccatcaccgacaggctggcctgcgaaatggagcagccgtggccgtcccacaccaatcgcttgatggtgtgcggttcgtcatcggagacttcgacatggatggtcgcctcgtcgccgcaggtcgggttgaactggtgcgattcaccgggcgtgcagtattcgtggctggcttgtacggtgacattggccgctgcgtccgcggactgttcgaccgctgcgttgggcgcaaaggattccttgccatgcggatgtttcgacgcctcgaggatgacctcttggtacatctgttcgaggtcatccccgctcataccgaattcgttcatggtgttctgttttactccactccaaagaacttacggatgcccttggccgcttcgaccaacgcttgggcatcttcgaccgaattgtagacaccggaggaggcacggttggatgcgtataggccgaagtggcggtgtaccggctgggcgcagtggtgtcccacgcgaatcgcgatgccctgggcgtcgatgaactggcccacatcgtgcggatgcacgccggccacgtcgaacgccacggtgccgatgcggtccacgttttcgcgcggcccgaggatgcgaatgccatcgacgtcgccgagcttgagcagttcggcggcgatggtcttctcatgggcttcgatgttctcgagcccgatgttcatcatccattcggcggcgacgcctgcggccaccacttgggcgaccggctgggtgccggcctcgaagcgggccggaggggccatgtattgggcctcgtggtccatgtaggcgagctcgaccatggagccgccgaagttggccggaggcagggcttcgagcagttcacgcttaccgtacaggaaaccgacgccggtaggaccgtacatcttgtgcgcgctccagacggcgaagtccacatcaagcgcgtggaaatcgaccttgaggtgcggtacggactggcaagcgtccaagatgaagatcgaacctacttcatgcgcacgcttgatgatcggggcgatgttggtgatggcacccgtggcgttgcccacgtgggtgacggccacgaccttggtacgctcggtgatgacttcgtcgaggttgtccgtacgcacacggccgtcctcggtcaggtcgatccacttgaaggtggcgccggtacggtaggacagctcctggaacggcagcagcaccgaatgatgttccgcacgcgagacgacgatctcatcgcccggcttcagggcaaaacgcttggcggcttctcccccacgccccagcgatgcattgccgaatgcggtggcgagcaagttcagtccggccgtggcaccaccggtgacgacgacctcctcttcaccttcggccgcattcgcgccgaccagcttggacaccttggctcgggcctcctcaaaggccatggtgctacgggcggccaactcgtgcgcaccacggtgcacgccggcgttaattgtacggtagaagttcgcctcggcgtcgatcaccgcattcggcttctgcgaggtggccgcagaatccaggtacacgagcgggtgcccgtgaatctcctgatccagaatcgggaactgcgcccgaattgccttaaaatcaaccattatgttccccctacttacgtaacaattgtacgaaacgagtgggagtctgacatggcctgttcgcgaccgtaaagacctggcctaagcggcccggagcgtgtcgagaatagggcatgtcagactcccacggtcacggactcaggccagtgcggactcggagtcggcgccttcgggcaggtactggtcgtagccgttctcttcgagttcgtcggccagctcagggccgccggtcttgacgaagtggccgtcggcgaacacgtgcacgatgtccggcttgatgtacttcaagatacgggtgtagtgcgtgaccatgaggatgccgaactggttggcttccttggcgcggttcacgccttcggacacgatgcgcagggcgtccacgtccaagccggagtcggtttcgtcaaggacggcaaacttcggtttcagcagttcgagctgcagcacttcggcgcgcttcttttcaccgccggagaagccttcgttcacggaacgggaggcgaacttcgggtccatcttgaggcgcttcatggctgcggacaggtccttggcccactggcgaataccgggagcctcgccgtcgatttcggtcttggcggtgcgcaagaagttggtcatggacacgcccggtatttcgaccgggtactgcatggccaggaacaggccggccttggcgcgctcgtccggagtcatcttgaggatgtccttgccgtcgaggagggcctcgccggagtcgaccacgtacttggggtggccggccaacgtgtaggcgagagtggacttgccggaaccgttggggcccatgatggcgtgggtttcgccggagtggacggtcagggtggcacccttcaggatcggcttgatgccttccttggtttcgacgtggacgtgcaggtccttgatttcgagtgttgacattgttgtgctcctaaaaatgctgttcttacttgtcttcgaggacctgtgccatggcgtcgttttcaccacgggccagtcggcggtcaatcacggtcatcagatgttcggagatggcgggaatgccgatctcctcgacgagttcgccgaagaagccgcgcaccacgagcttgcgggcgtcggtttcggggatgccgcgggattcgaggtagaacagttcctcgtcgtcgaagcggcccaccgaagaggcgtgaccggcaccgatgatgttgccgttttcgatttcgaggttcggctcggaatcggcgatggcgcccggggtcaggaccaagttgcggttgagctcgtaggagtcggtgccgggggcggtgggctggatgagcgcgttgcccacccaagtggagtgcgcgcccttgccgtcaagcgcgcccttgtagaccacgcgggacttgcagtcggggtggttgtgtaccaccatcgtgcggtgttcgatgtgctcgccggggtccacgaagtagatgccgagcatgttgaggtcgccctgttcgccgccgaagtcctgatccatgcggatgcggacgatgtcgccgcccaaggtcacgacggagtggcgcagggatgcgccttcgccgacgtggatgcggtggttggccacatgcttggcggttttggcccattcctgaacaaacgtggtggagacgtgcgagtccttgccggtggtgatttccacgccttcggccagtcgtgcgtcaccgtcgtgttccacgacgacgtccgcatgagccttgtcggcgacggcgatcaccagatggaaagcgtcgaggtcctcccccgcgccgtgcaccttgacgagcacgggctgggcgatctcgccggacagttccagaatggttgcggtgcggccggattcccattcgactgcggagacgcggtcgttgggcttggacacagtgccggacaggccctcaccgagcttgatctggctgagcttcacgccttcggccaacggcgagccgtcaatcatggagacttcgatctgcgtttcgccggaaggctcgaacacggtgaagaactcgttgatgcgctcgataggcgtgtagcgccattcgtcctgcttgcggctgggctccgggtaatcgcctgcgttgaacgagcgcacggcatggtccacggaggacggcatagcggccggaatcgcgtacgggtcgttggggtcggcgaccggaatcttgatttccttgacgggtgttgtgttgtcggtcatcggaatcagcccaccgatccttccatctgaagttccacaagtctgttgagttcaagcgcgtattccatcggcagctcacggctgatcggttcgacgaagccgcgcacgatcatgcctcgcgcctcttcctccgtgagacctcggctcatcaggtagaagagctggtcttcggaaatcttggaaacggtggcttcgtgggccatcgaaacgtcgtcttcgcgaacgtcgacatgcgggtaggtatcggagcgggagaagtcgtcgaccagcagggcatcgcacacggtcgagttggacgaaccgtacgcgcccttgacgattttgaccagaccgcggtaggcggagcggccaccaccacgggaaatggacttggcgacgatggtggagctggtgtgcggggcgaggtgaatcatcttcgcgcccgtgtcctggtactggcccttgccggcgaagccgagggacatggtggatgccttggcgtacggttcggcgaggatgcaggccgggtacttcatggtggccttggaaccgatgttgccgtcgacccattccatcgtgccgccctcgcgcacgtaggcacgctgggtgacgaggttgtagacgttgttcgaccagttctgcacggtggtgtaacgcacgcgggcgtgcttttcgacgatgatctcgacgatggcggcgtgcagcgagtcctcggaccagatcggggcggtgcagccttccacgtagtgcacgtaggagccttcgtccgcgatgatgagcgtgcgctcgaactgacccatggccggggtgttgatgcggaagtacgcctgcaacgggatgtccacatgcacgcccttcggcacgtatacgaacgagccgccggaccatgccgcggtgttgagggcaccgaacttgttgtcttccggaggcacgacggtgccgaagtacttcttgacgagttcagggtattcgcgcacagcggtgtccgtgtcgacgaagatgacgccctgcttcttcaggtcctcctggatggagttgtagatgacctccgactcgtactgggcggccacgccggagacgaggcggttcttctccgcctccgggatgccgagacgatcgtaggtgttgcggatgtcgtcaggcagttcgtcccagcttttcgcctgcttgtcgattggcttgacgtagtacttgaagtcgtctgcgttgaagccggagagatccacaccccaatcgggcatgggcttttcgaggaacgccttgaatccacgcagacgcatgtcgagcatccactgcggctcgcctttgtcggcgctaatcgcgcgtacgacgttctcatcaatgcctcgttttgcggcttcgccggcggcatcagaatcatgccaaccatagttgtagtcgccgaactggctgatgatctcgtcatccttcttgatcttgtcctcgttgacgcgggtacgatcagccacatactggctcatctccacgtcagcggcggcgtttggtgctgtgttttcggtcaccatcctgccttccttgtatcacacttaatcctatgaaaacctagcagaacccaagtgcaaacactagccgccctgacgcatattggctgtgggcttgattacacgaatgcgatacagcgatattggagccgggcaagcttgtcccatgcacaccgaacatcgcgtatgcggcattatgtgtcgcaccactgcatgccgtatttgttacatatcacactgttgcatatcacacttggatatgcacgctcgtgcccatattgcaccagttgtagaaccattcggccacatcccatccgatacccacgcaaccatgagatccgttggcaatggagggcattacggcatccgctacatatccgccggcaatacggtggattgcgcaaccggaggagaagtaattgacgaagcccacgtctttgacatcccatgtttccaccgtgccatcggcaagattcagcgtgccgctcatatcttgactgggcaacttttgccatacgttgaagtcacctgtcggcgtacacatcatgccaacgcattcgccggtgacgttgtcattgccctccgcgaccacgacattcaatgtcttgaccaccgtgtcattctcataggcatagagcttacggtcggacaggtcaatcgccacgcgatgagtgaccttgacttcctgtttgggatcgaccttgccgtccacattcactgaaccagttcccgtggccagcacctgagccaagcgagcaccaacctccgtatccgcgccatcggcaatcacaatgccatcatggccttctgtttcagtgctcagcacctcgccagcattattgacgacgaccttcttgtcttcacgttccaatttgagattcggcttgatttgctcgtcatagtattgctgcagcttatcggcatcaaaaaccacgtagccattacgtacttcattgtctttcagctttgactgctggttggcgtcgatgcgcatggccgaacccagcatggacgcattcacggtggcgatgtctttatccgccaccttgatggccacggcattgttcactagggtttccagcgtggttttcgcctcatcggcaattgcattggtaatcgtcggttcggttacgtcgagttccacccgaacggtctgtggctggacactgcccaatgactccactgtggaaatggcttgcttcgcaatgctggtggcgttggctccctggccattttctcccgcaataacgttgaagccactgttgttatcgttcaatgcgacttgcgcgtcaacaggttcttgtgcatcaatgttcagcgccttatctaccacactgccatcagcgagctcgggattgatttgcggggccacatcatgcgtaatccagaacgcatactgttgccaccatgcgtcaccgcgttgggcattgatgacatcggatgcgattgcttcaccatcaacttcgatgccgagatctttcagcgtgaacgtcgccgactgcccctggtatttcgctcgtaccgcggtgttgtcgacctggtcgttgattaggtcgacaatctcctgctcggttttgccggtaactgaatttccccatagcgttgtgccaggcagcacgtgatcttggaagaaccaaacaccgccgccacaggcagcccccaaggcaaccagcagacaagcaatcaccacccacggccagatgcggcgcctcctcatctcatcgccctgaatggaatctgatgcagcagcatccacactgtctgccacagtgccgctgacggcattattcgcaccaaacagaggcgcaaactgctgggtcgagtcatcaaggtgttcggtcatggtcggtctttctgcgatggcctactaagcgttatctgcatactaccaacacaccatagaaacggtaattttttaccgtcgccttccaatacatcatgctgcatgctgctcatacaacaaaaaagacgtggtggcgaaacatcattagatatttcgccaccacgtctttaccgtatgtcttgcactacgccgatgacggcagccagcacatcatgccgcgatattatgcacggcacgaaagtgcgtcagcgcgccgcctgatggtcgagcgcggccttgaccaggccggcgaacagcgggtgcggcttggtcgggcgagacttgaactccgggtgagcctgggtggccacatagaacgggtgcacgtcctgcggcagttccacgaactcggtgagctcgccgtccgggctctggccggagatgcgcaggccgccttcgcgcagacgatccttgtaggccacgttgacttcgtaacggtggcggtgacgctcggtgacatgcgtggtgccgtacagttcggcgaccagcgagccttcctccagctcagccgggtaggagccaagacgcatggtgtggcccatgtcgcccttgccggccacgatgtccttctgctcttccatggtggcgatcaccgggttggcgcaatcgggctcgaactcggaagagttcgcgtcttcaatgcccagcacgtggcgggagtattcgatgaccatggactgcaggcccaggcacaggccgagggcaggcagcttggtttcacgggcgaacttcagggcgccgatcttgccgtcgatgccgcggatgccgaagccgccggggatcacgatgccgtcgacgttgtcgagagcggcggccgcaccttcggtggtttcgcaacgatcggccgcaacccacttgacgttgaccttggcccagttggcaaagccgccggccttgatggcctcggtgacagacaggtaggcgtccggcagatcgatgtacttgccgacgatggcgatgttgacctcgtgcttggggtggtgcacacgctccagcaggtcggcccattcgtcccaatcgacgtcatggaacggcaggccgagctcacgcaccacataggcgtcgagaccctcctcgaacaggatcttcggcacatcgtagatgctcggcgcatccacgcagttgaccacgccttcggcatcgacatcgcacatcagggagatcttgtctttgatggactggttgagcgggcggtcggaacgcagcacgagggcgtccggggagatgccgagctggcgcagcatcatcacggaatgctgggtgggcttggtcttgagctcgtgggcggcggaaatgtacggcaccagggaaacgtgcacgaacatgcagttgtccgggccaagatcgcggcgcacttcgcgggcggcctcaaggaagggctgggactcgatgtcgccgacggtaccaccgatttcggtgatgatcacgtccacgtcatcggaagcctgggcgcgcatacgagacttgatttcgttggtgatgtgcgggatgacctgcacgcactggccgaggtattcgccggcgcgctccttgcgcagcacttcctgatagatctgaccggtggtgacgttggccttctggctcaggaagacgtcgaggaaacgctcgtagtggccgatgtcgagatcggtttcggcaccgtcttcggtcacgtagacctcaccatgctggaacgggttcatggtgcccgggtcgacgttgatgtacggatcgagcttttgctgcagaacatggataccgcggctgcgtagcaaacgaccgagcgaagatgcggtcaggcccttgccgagagaggagacaacgccgccagtgacgaaaatatgcttggtgacgtgttcttgagaattaccatgtgttcttctaaccatggaatttcactctatcatccgtgtatgacccggcgtgttcaccagacgcgtcggccccgacatggcgtacttgaacaatacgaatagtaggctcgtcaaaaagcatacgcaaggtcataatcacgtcaaacgtcttatccgccagctattgcaggtattggtcgagacgcactaggcctaacgcatataggacaaacgctgttttcaggtttttcagcgaggcccattcatcggcgccgtgcgcgttgccggcacctggtgcgatgaatggcggggtctccaggtcgatgccgtcgaccgccggcacatggtcggcatggaattcgggaccgaagttgagtgcgcgcgggataaagcgggcgtgggtgccgtcgccgacagccacgggtcgagcctcgcaaccgaacacgtcgttgtaggttgcggtgagcaactggacacgcgggtcgtcagcctgcacgtagtatgggtcatcgttaaggatgtcgacaatgcggccgcccgccgcttcggcttgtgcttgaatacgctcgatgatttgttcgtgtgcctggcctaccgcataacggatgtcgaagtgcaatacgatggcatcttcagaagtctcacccgataccgcgcctaataccttgtctgcttcagcgaactcattcgccggcataatcaaaccaccattggcggtagtcggtccgctttccgcattctcgcaatcgatacccaagccagtgccatatgagtcttttgtccattgggcaatcgcctgcgctgcagtgaggtcacggccttcgagcagaccggaccgggcaagcgccgtagtgagcaccgctatagcgtttacggtaccggacggctggcaggcatgaccggcgacaccggtggcctcaatcgtgacgccttgcgctgttgcgttgatatgcaatcgctcggcgatatctggagcgatgttgccgcacggtagattcgtcgacgccggtgagggtgattgcggcggccccgggaaccgtgttagtggcggtgccggcatgccaaccgcgcaattgcggcccgaccggcagttcgacatccacatcgagcagccctttttggatattgttcaccgggaagggaccatcggtgacgatggcctggtacggcgcgccgatgttggcgacgaaccatttgatgtcgttgagcgcgatctcttcggagccgccgaacagtatacgtacgcggtggcggaaacggtggtcgtgttccttgaagaaacggagtaggaaatagctggtcagcgcgacgcctttattgtccaatgagccgcgaccgataacaatatcgccaataacctgcggatcgaaggcatcgtgcgtccaaccgtcgtcggcggggactacgtcgaggtggtcgacgaaggcgatgtcacggtcggtctccacgttctcctgtggataaacgacttccatgacgtggccggtgtagtcgcgcgtaggcagcccgtctcgtcctgccttggccagcatatggtcgaatacacggcgtacttcgggtccataaggcgcgcccggacgaggattcgggtccgattcgtcggaaaccgacgggtagcgcagcagctcacacagctcatcgacgaactgtgcgcggtgggcgtcaaaccagcgtgacgcggcatcgacgagatcacgttccgtggcggtgagagtcatggcttcctttacttggacgcttatggtttcctcaggtaacaggaatcccgggcgcaacgtcgactgctacccgggattggctggagggcttggttctattcgctcagcaagtgcgccacagcatcgagcgcgagcttgtagccgtagaaacccatgccggtgatggtgccggtggccacagggctgattacggaacgcttgcggaactcgtcgcgggcggacgggttggaaatatggacttccataagcggcaggttctcgtcaatgaccatgtgcgcggcgtcggcgagagcatacgaatagtgcgtgaaggcggcggggttcatgaccaccggggttttctcgtcggcggcttggtgcatccagtgcaccatttcggcttcgtcgtcggtctggcgcacctcgacttcgaggccgaagtccttgccccattcggtgcagagcttgcgcagggtgtcgaggtcttgacgaccgtagacgtcgggctggcggacgccgagacgtccgaggttagggccattgacaacgatgactttggtcattgggactccttttgtttgtgcttctctccctccgccccttcggggcacctccctcatcagagggaggtagaaggtaaatccgactccggggtacctccgttagaggggagccaagtacttttttctgaggggatggcgaacggcacggcctacggccgttcaattactgctggatacgacggaatgcttcttccacggcttcggcgggcgggttgtcgaggtgtacgacgtgaccaatctcgtcgaggaccacgaagcgcagctcattgccgcgggccttcttgtcgcgatgcatcaatgcgagcacgtcgtcgaacgagccgccattccacgacgtcggcagacccatcgaagcaagcaacgagcggtgatagtcaaccagatcctgatcgatgtaaccgatcagatgggccagctcggcggcatacaccataccgacggccaccgcattgccatgcctccagcggaaatgctcgagcttttcgatggcatggcccatcgtgtgcccgtagttgaggaattcacgcagacccttctccttcaaatcggaggagacgtggtaggccttgacctttaccgtgcgctcaatgagctcggcaaccacgtcttcgagcggcgagccgaggaatgtagagccgtcgaaagcgcgcagttcagctgcgtggtcttcgaggatatgcaggatttcggggtcgcggatgaaaccggatttggcgacttcgccgagaccctcgatgaagatgtcattgggcagcgtagccagcgtcttggtgtcggccagcacaccggcaggcgtgtagaacgagccgacgaggttcttgccctgcggggtgttgatgccggttttgccaccggtggaggcatcgaccatggccagcagcgaggtcgggcagtttacatagcgcacgccgcgcatccacgtggcagccacgaaaccggccaaatcggttgcggcaccgccgccaagccccaccacggcatcggatcgggtgaaaccttcgttgccaaggcgttcccaaatgccgttggccacggtaatggtcttgccgggttcggcatccggaatcacgatgtcggaaacctcatagccgccctgacgcaacagggcgcgggcacgatcggagtgtcgctgcaccggctgagtgtggataagcgcgattttggcgggtttgggtcccagcacgtcgaccagatggttcatggcaccttcgccaatgaccacatcatacggctcaattgccgctccggtaacatgcactgctcgctcagataccatatcaatcactttcttcgctgcgccctgaggcgtaagcccccgggtatggacatgaacgttggcgacctcgcggaatactgggtcacgctgcttgaacagttttttccaacgggagttggcgttgccattgagcatgggccggcctcccccacggttcgcgcgttccatggcttccgccggatcggcatcaaggtagaccacacgaccgccatggtcgatgtaggaggcgagggcatgctgggtggatggcgtcatgggagcgccaccgcccagcgaaaagataccgtcgaaatcctcaagcatatcggcgatgagatcggcctcgacctcgcggaatgccggctcaccgtattcctcgaagtaggagggaatcttcatgcccacttcacgttcgatctccacatcggcatcggcgaacggcagacgcaacatatgcgccacttccttaccgacacgtgttttgccggctcccatcatgccgatgatgacggcgcgggggcgtgcggtcataatctacgaatcctctcgacgattggtgagtacagttgctgatggttccgcggcagtcgtcacgaaaccatacgcccttcgttcagcgcatgtgctccggccacgaggcgagatacgactcaaggttgcgccgtgtttcggcaacactgtctccaccgaacttatccagcgcgtacttcgccaaagtcagacgcaccatggcctcggccaccacggatgccgcaggcacggcggtgctgtcggaacgctggttgatggcttgtgcggattcgccggtcagcacgtcgaccgtacgcagggccttggggatggacggaatcggcttcatggcaccgcgtacgcgaatcacctggccattggacataccgccttcaatgccgcctgcgcggttggacagacggtcgatacggccgtcggcgttgaccacgatctcatcgtgcgcctgcgaaccggggcgggaggcttccaggaagccgtcgccgatctccacacccttgaacgcctgaatgcccatgatcgcggaggccagagccgcgtccagtcggcggtcggactccacatacgtgccgatgccggcaggcacaccgtaagccagcacttcaatcacgccgcccaacgtatcggaggccttcttggcctcgttgatgcgttcgatgatgcgggcttcggcctctttgtccagcgtacggacaggcgaggcatcaagcgcttccagatcgtcgggggtgggcagaggcaggtcggggttggtctgcacgccaccaagcgccaccacgtgggctacggtgcggatgccgaacgcctgatccaagaactgcttggccacctcgcccaaagccacacgggaggcggtctcacgggcgctggagcgctccagtaccgggcgggcgtcgtcaaaaccatacttgcgcatgccggtcagatcggcgtggcccgggcgcgggcggctcagcggcgcattgcggccttcgcgcggcaggtcatggtcgagtgcatcggcgctcatgacctcggtccacttcggccattcggtgttggcgatttcgatggccaccggcgagccgagggtcaggccgtggcgtacaccggtcagcagacggaccttgtcttgctcgaacttcatgcgggcaccgcgaccgtatccaagtcgacggcgtgccagtgcggaaacgatatcgtccgtgctaatacgcacgccggccggcaacccttcaatcatggccaccaatgcttctccgtgcgactcccctgccgtctgccaacgcagcataacttccctcgtttcatgtgtgtacgcctatgtgtacgtctaactaggggttaatgttaagccatgccatacctgttcacgctacccggtctgctatgtgggcttgcactgtccattgaggatgttcgtcaccggcgggtgccgatcgcgtgggtggctgcgggcgcgttgcttcagctggccgccgatttcgcgtatggagtggtggtgaacgacctgttcgtgctgttgcaggcgctgttgttcaccgtgctatgttgcctgatccagttcgcgttggcattgctggtgccgcggtcattgggattcggcgatgtgaccgccctgatacctatgggattgtctgtcggactgtttggcctgttgcctgtggtggtctggtggctggcgatgggcgttgccggcatcacatggattgccttgtggacgcgattcgatccacaacgcacatcaccgacacatgcgggcaaggtgccgtatgtgccggtgatattggcgggcgcgattgtggcggtggctgttggggtgttgtcctagatttcttccatccgcttcgcgggagccccgggcttaagttgagcgttacattccctgcagtgctcccctcagtccgcttttttgcggacagctcccctcggcgagggagccaatgaagagaccaacgtccgatcagcttccccaagcgaaggaagctaacgggatgactactggttttcggcttgccacttgcgtagttcggccacgttctggtcatgttcatcggcggttgcggcgaacttggtttcgccggtgtccagattgaccgtgcagaagtacagccaattgccgctttcggggtgcagtgccgcttgaatggcgttatcgccgggattgctgatcggcgtaggcggcagaccggagatcttgtacgtgttgtacgggttggactcgtcttgggtcatctcggtggtcacctgcgcgggcttgacgttattgccataggccacggtggaatccatgcccaacgacatgccctgctccaaacggttctcgatgactcgcgtcactttgccgtagtaatcggctttgttgacctcggcctcggcgatagaggcgatgatcatcacccgttcgcggtcaccgccggccggcacgcccaattcatccaacttggcgatacgcttatcgaccatggccttgaggatttccgaagcgctcttcatgctcttgacgttgtaggttcccggctccagccatccctcaaagctaccgcccgcttcattgggcagaatatccttacccttgttcttgataatcgtgtcgaattcgctttgggcaatgccggaaagcttcgcggcgttggcgaacacatcggtggcacgttcaccgggacgaacctcgaggaagcccgccgcctggttggtgtcggagagaacgtcgatcactttggatgcggccatatgcttcttcaatgtgaacgttcccggatagagtgtcgtgctattggcgttgaccacgctggtgaacgcggcagtagacttgatgacttcggccttgagcagattatcggcgatctccgccgcgccttggccctcgctcacggtgaattcgacctcgccatagcccggtcccggatagtccgcgatggccgtcgactggttgctccggctgtcgcgccatgcgatgagcttggttacgccgaaatagccgccgccgataagcagggcgacgatggcgatagcgatgataatgccactgatacgcttgcgcctgcgctgtgcacgtcgcttgcgcatctccctgcgggatttcggcggttctggcggctcggccccgcgcattggttctgacccctgttcgacccaatgcgtgttgtcatcaaagaactcgttaaaatcatcggtcataaccgatacctcactgctcccgggtacggtcgagtgccgtctgcaaaatcaccactgccgactgctggtcaaccaccggcctgtgcttgttcgaagctttatgggcctcgaacagctgacgatgcgcactgactgttgtcaatctctcatctatcaatgatacctgcggaatctgatactccgtagaatcactgtcttcactctctgcttgcagcctcttctccagattggccgcccacctgcgcgcttttttggcgcttttgccttctgtaccgtccatctgcaggggcagtccgacgattacatggtccacatgttcgtcttcgatgacgttcaggacctcgtcaatagcaaagaaatagtcgccggcaacatgaatgttgccagcaggatgtgcaaaggtaagctccgggtcggacagtgccagtccgacccgggcattacccaaatcaacgcctaaccacaccactggcggaatcaggctttctgcgcctcgtgcttgagcgcttcgagggcctcgtcgatcttggaggcatcgacaccgccaccctgggcgaagtccggcttgccgccgccaccgccgccgaggaccttggctgcgccacgcaccagatcaccggccttgatgccggccttgcgggcggcctcgttggtggccacggcgaccatcggcttgtcatcctcgttcacgccggcaagggccaccaccacgggggcgtcttcaccgagctgggcgcgcacgtcgagtacggtcttgcgcagggcatcgaccgcgccaaagtggcccacgttcttgacggccaccttgaccggggccgcggagttcttggtgtcagcaaccagcgccggaaccgaggcggccagctgggactcgtacatggaggccaagcgacgatcggattccttgagcttggcgagcagggcgttcacacgctcggcgagctcgtccggacgagcgttgagcttgtcggacagctgggagaccagcgcgtgctcacgagcgttgaagtcataggcaccctggcccacgacggcgtcgacacgacgcacgccggagccgatggaggcttcggacaggatgttgaccatgccgatcttgccaacgtggtccacgtgggtaccaccacacagctcgcggctccagccgtcttcgccgatggagaccacgcgtacgatgtcgccgtacttctcgccgaacaggtgcatggcaccgagggcgatggcgtcgtcgaacttcatttccttggtggtcacggcgaggttgtcgcgcagcttgtcgttgacgcgctcctcgactgcggagatcacggacttggccggggccttggaccactggaagtcgaagcgcagacggttcggggcgtcttcggagccgcgctgggtggcctgcgggcccagctcctcacgcagcgccttgtgcaccatgtgcgtggcggtgtgcgagcgggcgatggcgccacggcgggccaggtcgatgttggcgttgacttcggcgccgacgaccagcgtgccttcggtcagacggcactggtggacgatgaggtccttgatgggcttctgcacatcgtcgacttcgagcacggcgccgtcgtcggacaggatctcgccctggtcggcgagctggccgccggcctccgcgtagaacggggtgcggtcgaggatgacctcgacgttggccgggccggtcacggcgggcacggaacccttgccttcctgcatgatgccgatcaccttggcgcgggcggacatgtcggtgtagccgaggaagtcgatcgggctgacgagcgtcttcttgaagtcgtcgtaaacggaaagatccacgttgtgacgcttcttgagggcgtcggcgcgggcgcgggacttctgctcggccatgagttcgcggaacttggcctcgtccaccttcacgccctgttcggcggccatctcgagggtcagctcaatcgggaagccgtaggtgtcgtgcagcttgaaggcgtcctcgccggccacgacgggctcggcggaatcgctcttggccttgttgacggccacgtcgagaatcgtggtgccggtctcaagggtgcggcggaaggcgtcttcctcgccatacgcggattcggacacctcatggaaggtgtcgttgagctccgggtagctggcctccatggcggccttggaggtcgggaagagggtgggcagcaccggatcggtcacgccgagcatgcgcatggagcgcacggtgcggcgcagcaggcggcgcagcacgtagccacggcccacgttggacgggcgcacgccgtcggacatgatcatcagggcggagcgcacgtggtcagcgaccacgcggaagcgcacgtcggcgtcctcgttctcgccgtacttcaggccggagagctgctcggcggcctcgatgaccgggaagacctcatcggtctcgtagatgttgttcttgccctgcagcaggtaggccagacgttccaagccggcaccggtatcgatgttcttgttctcaagctcgcccacgatgtgcaggtcggtcttggacttgacgttgtcgacctcgtagttctcgaacacgaggtcccagatctcgatgtagcggttctcgtcggcaatcgggccgccttccttgccgaaggcggggccgcggtccacgtagatttcggagcaggggccgccgggtccggggccaccggtggtccaaaagttgtcttccatgcccatcttctggatgtgctcggggtccacgccctcgttgatccacatggaacgggcttcgtcatcgtcggtgaacgtggtcatccacagcttctcggggtcgaagccgtagccgccctcatcctgcgaggtggtgagcagctcccaggcgtagtggatggcctcttccttgaagtagtcgccgaaggagaagttgccgagcatctggaagaaggtgccgtggcgggtggtcttgccgacctcgtcgatgtcgagcgtacgcacgcacttctggttggaggccatgcggcgcttcggcggggtctgctcacccatcaggtacgggatgaacggcaccatgccggcgatggtgaaaagcgtggtggggttcggggaaatcagggatgccgagggcacgatgagatggtcgtgcttggcaaaataatcgaggtatcgctttgcgatgtccgcagtgcgcatgagcggatgaactccttgtttgggtaatgggcgcagttgcgcctggtattggtggaaaagactggattatgaggattagtttgttctagctgattcagtgactagatggcaaggcggcatgcgcgtgtcagttggcgcgctcgatgtactgacggttgagctcagcctcgcgggctcgacgggtggcattgaactcgttgaccaacccttcgagtgttttcatcggcacattgtcctgatcggggccaagcaggaactggcgtgccgcatcaggcgtattggccttgacataggcctgtgccttggtgacggcaacgattccgatggccacgccgacgccgacccagaagatgcgtttgaacatcactcccccttctcggcggtgtcgttgacggtggttttcgcggcgttcttcgcaaggaaggactgacccgtggttttcagcgcgtagaaggtggaagcgatcttgatgatgggcttaccgaggaaggagccatacagatcggtcaacgcaccaacgttgttggcggtggtggaagccgcggcggaaatcttgttcacgtcttcgagcgacttgttgacctgcttgacggtggtcacgccttcgtccagcgcggggatggcgtgttcaccggactcccggaccgtctgcgatatctgatcaaacatcttgcccagcctgatcagcggatagatcatgaaaccggccaatactgcgaacgcgatggccgcgatcaggccagcgatctctccgactcccattgtttcctccttgcggtcacacttactcgcctaagggtagcactccttccctatttcttggcataccattgcatgcgcagggcgaaaaccgtgcgcgtgggcgtatgcggctataggcgaaaggctgtcctgctgacgctttcgtttgcggcgtgccgccgtggaccgtacgtgctattcgatatgtattgcttgctatttgctacttgccgtacgaaacgatggtcacggcttcgccgaacggcttgtcggtgtcgaagtcgatcacggttaccgaaccattggccgggcgttcgttcagatcgaggtcagggccgccgaaccggtgaccgaggctaagcagtgtgttgccatgcgaaatctgcagcacatcgtcgccgtccttgagattcgggttgtcggcgataagacggaacgcaccttcgacgcgcgtccaatattcctcatcggattccgcgtcgtggaagggatcggcttccttgagaaaatcacgcgaggcccccaacccgaacttctcgacgatttggttgtaggttttgacgccgtggggcgctcccgcggcgtaccaggccatggccatgtcaagtccctcgtagtagccgtagaactgctcgcggaagtgcatgtccgtcacgagtgcggggcgcgggttacccgcggcttcgttgatgtcgagaattttctcggccgtctgctgggcacgcgtggtgtccgaacagtaggcggcggcgaacgtcaatcctttcagtcgctcaccggccttgacggcatcggcgacgcccgactcggtcagcggcgaattcgaccatccctgcagacggttgtatcggttgaaataggtctgtccgtgacggaccagatgcagatgaagaatcatggttctgattatgtcaccattccggcggtttcggtgcgggttgccggaagtcataagtcataacggcataggtcactacctgagatatgcgtaatccgggcagtatacctaacgattcctgagagtacacttagaatactgtgagcataaccttgaaacctgcaccatctcgatcgtctgtgcctgcccatttcaggggtatcgatggactgcgcgctctggcgattcttggagtcatagcattccacacccgcccgtcgctattgcagggcggattcattggcgtgacgatgtttttcgttatcaccggttttcttgccacacgttcggtactgaacatggtggaccgcaccgggtcctttggatatggccgatatctgatccgccgcattactcgtttatggccggtgatgctggcgaccattgccgtggtgccttggctcacttggatgttcgctcccagcctgttgcagaaagtggtttccgattcgctgccgagcgccttgttcgccagcaattgggtgtacatcttccgcaaggtgccgtatttcgaggcggccggattgccttctcctctgacccatctgtggttcttgggcgtgacgatgcagttctatctggtttggccgttgctgatggtggtgctcggcaaaatcaccaagtccaaatgggtgcgctccatggcgattcttgtcatcatggctgcttccaccgccgacatggtgctgctgtttgacccggccaatacctcccgcgtgtattacggtaccgatactcgcctcgccgagctggccgccggcgcgctgttggctatctggattgcgccttcctcgcgaggtacggaagctgcggaagctggagcggcttcgcaaacagtgcagatcgaacgtcaggccggcgacaagacgggcgcccgtctcactatcgtctgcaatgttcttggcaccgcggctttggcggcactgctgaccggattctggttcgccaacgggtatctgtcgtacatgtaccaaggcgggtacctgattaccgcgttcatatcgttgtgcgacttggcctgtgccgtgaacaatgactcaatctggtcgcacgtgctgggttgtgctcccctacgctatatcgggtcgcgatcgttctcgctgtacgtcatgcattatccgctgctgcagttcatgaacccggcgacacgaacgcaggcgttgccgtggtggggttgggttcttgaggccgtcgtggtgttggcggcgtcggaagccttctaccagctggtcgaggcggcccgtaaatcggtgcagatgcctcgtagccaacacgccaagccgctgccgaaagccggctaccggctgcgcccgggcgcgtgggtcatgtcggttatcggattggtgaccgttgtggcgctgacgtgggcaccggtggactggaatggcatcgctcaagcgcgagccattcagctgcgccccgaactcgcggcacccgccaagccggtcaagaaaccggcgaagcccgagcccgagtcttctgccataaatgccgcgaacggcgaaaccaataccgctgacgcgaataagaacggttcggattctcagccgcccatcatcaaaccgattgcggaaaaggtgccaaacaatcttgacatttcgaagtacgcctatgatccggcaacggaaagctgcaacgcggatatgatgatggtcggcgattcagtgacgtcgggtacttcggacgccatccaggccgcattcccgaacgcttttatcgatggcctgccgaaccgtcagctgccgcaggcggtggatgtgtatcagcaggacaccgctgccggccacagtggcagtgtggtggtgtttggcctcggcacgaacggcgtgatttcgaatgagcaggaagtgcaacagctcattgacctgaccggcggcaagccgacatacttcatcaccatccgtatgccatacccgtggcaggagaacaacaacaatacgatgctgcgtgaggccgccaagaagaacaagaacgtgggcatcatcgattggcatgggtatagcgaaggtcatagcgaatacctcaacgatgacggcattcatccgaatatgaccggtgcctatgcgtacgcgacgatgattcgccaggcggtgtgcggccagtaatcgccctacaacgcaggaaccccgcggcttctcgaaagaagcgcggggttcgagcggtatgtcctggatttgttgaccagagggcccggatcagcgggcgtagaattcgaccacgtactggatgttgacctgcaccgggatctcttcgacctccggcttacgggtcacagtggccttcagggacggcaggttcacgtcgaggtagccggggaccgcaggcagcacgtcacggtgcacgccttcggcggcgatctggaacggaaccatggtctggctcttggccttcacctgaatggtctggccgggcttgacgcggtaggacgggcggtccacgatgttgccgtcaacgaggatgtgacggtgcaccacgaactgacgggcctgggcggtggtgcgggcgaagccggcacgcagcaccaggttgtcgagacgggtctcgagatcggtcagcatggcgttaccggtctggccggcagtacgggtggccttctcgtaagcggcgcgaagctgcttctcggagatgccgtactgagcgcgcagacgctgcttttcgcgcatacgcaccgcgtaatcggactcggtgcggcggcggtcacggccgtgctcgccaggagcgtacggacgcttttcgaagatgcgctgagccttgggggtcagtgcgatgccgagggcgcgagacagacgcacctgacggcgagaacgctgaacgttcgtcattggattaatccttctgtcgttatctgaacggaacgcttgccttgcatatgcctggcaagcgctgagtcgggcctccccagcgcttcgtcgtgaacgaacacgaacgggttggttctcttgcgattacctaccgccgacccgctgatgggctatgactccagacggtatctacctgttggcagacaccagcagaccatattacaccgaggctatggacagcactccggcgtccatgcgatacacccggtctgcgtattcgagtgcatcgggatcatgggtgaccatgagaatcgccgtgccgttgttggcttggtctctgagcagacgcattacgatgtcggtgctctcttggtcgaggtcgccggtcggctcgtcggcgatgagcaggctcggctggttcatcagcgcgcgggcgatggagacgcgccgcatttcaccgccggacagctcgcgcgggtagctgtctgccagatcggcgacaccaagctgggtgagcagcgtgcgagctcgggtggcgaacaggtccgaacggctcgcagccgtgtttgacggcgtgttttcccggtctgtgattggcgcaatgacatccggcatgaacgggtcggcggccgaatcggcggccgattcatcattggtggcagcggcttgtgccacagcatcggtcgacgcaacagcgtccacctgagcaacggcatccgttgcttctgcgttttgggcgaacggcagcggctccggaaacatcgttgcgggcagaatcacgttgtcgagcacggtcaggttgccgagcagggtctggctttgagtcacgaatccgatggtgcgattcctcagcacggacagtgctttatcgcccaagtcggacacattgcgtccagccacgctcacggttcccgaggtcgggcgaatcagcccagcgaccatgttgatcaacgtacttttaccgttgcccgaccggccgacgatggcgatgaattcgccggcatcgacggtgaggttcacgtggctgacggcgtcgaacggcgtgccgcggcggacgaactggcgggtcaggtccgtcaaggtcagcagatggtccggggagggcgtctcggttacgtgcggcgaatccggcgcagtcggcgcgttcggctgagctggcgtggtcggctggagcttggtcggctcaaccgtggtcggctgaagcggcgtagttgtctcagtcatatcactccccctctcgcagggtcaggtaggcttcgggccggccgagacgccacatggtggccagcgaaccgatgatgccgatgaccgtagagcacacaatggtcacggcaatgaatccgatcaccgcaaccgggctggcttgcagatacggcaattgaagctgcttgccgatcagcgaactgaatgggaaaatcaccaggctggccgcgccgacgccgattacgccaccgatcagaccgatgatggcggattccttcagaatgatggcattcaacatgccgcgcgtggcgcccatgatgcgcagggacgcgaattcgcgtttgcgttcgttcaccgacgaggcgaatacggcgagcagcacaatcacgcccattacccagatcaccgccacgaaaatcttgaggtaggtgacaagcgcggtcagcgaagttctggtgttggcggtgatgccgccggggtatacgtaccccaaatcggcgaatcgggagtcaagacgcttgatgttctcagctacggtttgcgcttcgtacccctgctgcgtcttaatcatcacggtggagacggctttgccggcatattcggcggacatgacctgcttggagaccttggccgaggcggcgaccatgtcgggcacggtgttttggttgatgaacaccgagttgtcgaggctggtgccggtgttggcgagctgggcgacgaccggccatgaacggccgtagagttcgatggtgccgtcggtggacacgttgacgtttgcgcctgcaatcatctgaccgtcttcaagggggccttcgaactgggaggcgacccatggttcgatgacgaagtcagtgtccgggtcgtaaccgatgatctgcagcttttcggcacagcaggcggcggccagcgatgatatataggtctgttcggtggcctgtgcgatgccgtcggcctgcatgacctcgtcggcgatgtctttggtgaaatagaaagtgctgggattgccgttggtgagcagcgcttcggccttctgcacggtgttttgcggcacgaccatgaggtcggcgcccaggcgcttttccatactggtcatgccagtgttgaggttcatggtcagcatggtgccgccgaagaatgtcagcgcgaggatggtgacgacggcgagcagtgcgccggtgcggaacggcttgcgtttgaggttttcaatcggaaggccgcgcaatgcgatatgggatggcacgatgaatccttatgttgcttatagtgcggttgcaataagcgaggccggagtccagcgttcggaatggctgggctccggccgtctgctcgatcagttgcgcttggcggcgcgagagtcgagccagatggcgatggccgcgaacacgatggtgagcacgccgagcacgatgagcgtgggcagcataaccatgcgacagtgcatcatcgcgcccttgcagatgccgatcagaaaggtgggtacggcgagtagtagcagggcgtcggctgcggcggcgatattgaggccgatgcgaatctgcggggcgacgaacaaagccacgacgccgaacacgaggatgacgacgccgatgccggtggccgcctgctgcgagtagtggcaggcacccggcatgtcatggccggtgcaggcgtgcgcaaaggtctggggcgcgatggtgatcagcgcgccgaacagaatattgggcacggatgcaaacagcttgttcttcataactactttttcctctcccctgttcccagggctcgtaggcacaacctccgcattatgcccacactgtgatgaagaacacaagtcttgttttttgcgaatttatttggtatataactcagcccctcgtcagaggggccaatttatctacaacttctcaatcggcgctacgcggagcatgaggcgtttgacgccggcggagccgaagtccacggtgattaccgaattgcggcccttgtcttgtgcgtcggtgaccttgccgagaccgtactggtcgtggctgatcatgtcgcccacggcgaagtcggcgatattcaggccattgtccttggtgagcttcgagctaggcacggcagagccggtcgaatcggatttcggtgcggtacggcgcgtggtgaccttgccgccacgggtgccaccatatgaaccggacgaagaaccggaacgggaacgcgacccgtaggacgacctcgaaccggagcctgaagaaccataggacgaacccgaacgggagcgggaaccataggaggacgagccggagcgggaaccatacgacgatgaacgggaaccatacgacgaagagccggaacccgagccatacgacgacccataccgcgaccgcgacccataggacgaacccgaaccggacgaaccacgcgagccgaacgtcgacgacccgccaaacgcggcgccgccaaaatcgtcatcatcccagccgcccaaatcgtcggcgaatccatcggtctcccagctggcgcgcatacgctccacgccggcttcacggcgtttccaatcaatcagcgaatccggaatctcgtcgaggaactggctgggcatcatatcggcggcctggccccactgggagcggacggcggcgcgcgtgacatacagtcgctgcttggcgcgcgtgatgcccacataggcgagtcggcgttcctcctgcagttcagtggtgtcttccatcgaacgcgaatgcgggaaggtgccctgttccatgccggtcaggaacaccaccgggtattcgaggcccttggcggtgtgcaaggtcataagcgtcaccttgccggagtcctccgcctcgccgggtagttggtcggagtcggccacaagcgcggtggtctccaggaatgcggacaacgtggcgtcaggcgtgttctgttcgaattcggcggcagtggactgcagctgggagaggttctccagacgggaggcgtcctgcgggtccacggatttctcgagttcggcccttaagcccgacttctccaatacttcggccacgatctcgctgggcttggagtcgtgcgcgcgcgtgaactgcgagagcgcgcccatcagatcgcggaatgctcgtagcgaggtggcggtgcgtgtcggcacctcgatctcatccaagtgcatgagtgcgtagaagaagctggtgccatgctcacgcgcgtaggcgagcagcacgccttcggcgcggtcgccaagcccacgcttgggcacgttgagaatacggcgtagattcacatcgtcgtccggattgacgagcgcctgcaaataggccagcgcatccttgatttcgcgacgttcgtagaacttggtgccgccgacgagctgatacggctgattcgtgttgatcagcgcctcttcgagcgagcgggattgggcgttggcgcggtacatgatcgccatgtcggagtaggcgatgcccgcttcggcgtgcaggcgcgcgatttcggtggccacccactgggcctcctgctgggcgttgtccgccgcgtagccgacgatcggctcgcccttgccgagcgcggtccacagtttcttgggcttgcggccctcgttgttgctgatcaccgcgttggccgcatccagaatggtctgcgtcgaacgatagttctgttcgagcatgatggtcttggcgttcgggaagtcctgctcgaagtcctgaatgttgcggatgtcggcaccacggaacgcgtagatggactggtcggaatcgcccaccacggtgatccaggcggggccggacttgccggcgttaggcgcgcccgggatggccttctcccccgtgtccacgccggccagctcgcgcacgagcacgtactgggcgtggttggtgtcctgatactcgtcgaccagaatgtaacggaagcggtgatggtagtactcggcgacggccgggtcagtgcgcagcaactcgaccgtgcggccgatcagatcgtcgaagtcgacggcgttggccagggccaagcgatgctcgtattcggcgtagatcaccgcgtagatggcttcaaggtcgcccaccgtgccgaactggtagccgcgctggccgggcgtgaagtcgggcgcgtgaacggcgaggttttccttccaaccggtcagattgttcttgaggtcggagatatggccgagaatcgagcgtggagtgtagcgcttgatgtcgaggttgaattcggtggcgatgattttgacgagtcgctcggagtcggcggaatcgtagatggagaagccggacttgagtccgatggacttgccgtcgcgcctcagaatgcgcacgcaggcggagtggaaggtggagacccacatgcgctgggccaccgggccgatcagcgagccgagtctttcgcgcatttcggcggcggccttgttggtgaaggtgatggctagaatctggctcggccatgcgccgaactggctcaagatccaggcgatgcggcgggtcagcacgcgggttttgccggagcctgcaccggctccgatcagcagcgcctgaccgcggtattgcacggcttccgcctgctgcgggttcaggtcgcccacgagttcctgtgcgctgcgtgcgatgacttccggctcgtcgtacactgttgcctccctttgaatcgcgacattcatgtttaccacatgcacgggtcagcgcaggacaacgtacacttacgagtatccatatcattcactgacatacaacaatgggaggttcaatgcaggaacttgaggagcgaatccaaagcgagggaacggtgaaggcgggtaatgtgctcaaggtggacgcgtttctgaaccaccagtgcgacgtacgcctgttcgaccgcatgggttcggcatgggccgctcatttcgccggcaagcacatcaccaagattctgaccatcgaggcgtccggcatcggcattgcgtgtgtggcggcccagcatttcggcaatgtgccggtggtgttcgccaagaaggcgcagtccatcaaccttgacggcgaccagtacaccaccacggtctattccttcaccaagcagaaggagttcccggtgatcgtggccaagaagtatctgaacgccggcgaccatgtgctgcttattgacgattttctggccaacggcaaggcgttgcgcggtctgatcgatctgtgcgaagcagccggtgccacggtcgagggcattggcatcgccgtggagaagggcttccagggcggcggtgacgcgctgcgcgctgaaggctacgatgtggattcgctggccatcgtcgagtccatgaatcccgagaccggcgaaatcacatttaggcactgagcacattggctgctcccgccggcgggagcaacagagagaagaagagaatcatgtcagagaagaaaaccaatcattccgtatcctttgaggcgttgtcttcgctggacgcgccagtatccttctggaagggcattccgttcggcctgcagcatgtgatggccatgttcgtggcgaacctcgccccgatcttcatcgtcgcctcggccgcgaagatgaccccggcccaatcggccaccatcatccagtccggcctgctggttgcgggcctgggcacttgcctgcaactgtacggcgcgtggctcatcggctcgcgacttccgatggtcaccggcatctccttcacctacgtggcggccgccgtggcgatctgcgcggacaagggctatggcgcggtggtcggcgcggtaatggtcggcggtctgctggaacttgtgctgggtttgacggccaagtattggcgtcggttcgtgccgcccatcgtctccgccatcgtggtcacgtcgatcggcttctcgctgctcaacgtgggtgccacgagcttcggcggcggcagcggagccaaggacttcggttcctggcagaacctgacgctcgggcttatatctttggttgcctgcctggcgttccagctgttgatgaagggcacggccaagcagctgtccgtgctgttcggtctggtggtcggctatgtggcggctatctgcatgggcaaggtcgatttctccggtttccagaacctcgccatcgtgtccgtgccgcagttcatgccgttcaagcctgagttcgactggggctcgatcatctccatcggcctgctctacgtcgtctcctcggtcgaggtgctgggtgacaccgccgcgctgaccaaggtgggcctgaaccgtacgcccaccgaacgcgagaccgcgggcgccatcgccggcgacggcctgatctccaccgtatccggcctgttcggctgtctgccgctgacctcgttcgcacagaacatcggattggtggccatgaccaaggtcgtcaaccgcaaggtgattctctccggcggactgattctggtgctggcgagcttcgtgccggccatcgccgaggtgttcaactcgctgccgcaggcggtgctcggcggctgcacgatcatgatgttcggcaacatcattctttcgggcttccagatgattgccgaggcgggcttcacgcagcgcaacatcacgattgcggcgctttcgctgaccatcggcatcggcttcacccaggtgagcgacatcttcacgcagttcccggcactgttccaacaaatcttcgcctcgaactgcatcgccgtggcgttcgtggtggccgtgatcctgaacaccgtgctgcccagcgaggagcacttcctctctgcgcccaaggaggcaccggccgcggacgccgagtgataacaacgcaacatatcagctgcgcataatcacatgatgatgccctatcgtcttgcaggatgatagggcatcattgattttgggagagactacaagttgaaccatgagttcgagccggtggcgtgtcgatcaatcgtcatcttcccattcgaggatgtctccgggttggcagtcgagtgccttgcagatggcgtccaacgtggtgaagcggacggctttggcacgtccgttcttcagaatggacacgttggcgggagtgatgccaatttgttcggcgagctcgccgacgccaatcttgcgtttggccatcatgacgtcgagattgatgcgaatcgtcatctcaaatcacctgctcgagttcgcgcccgagccggacaaggagaacagtttccatacggccacgaacgccgcttcgatgcagaacaggaacagcacgcccataatgagatatggccagtgcatcgacgtctggctcgggtagaggccggccagcgcgccgctcaatcccggtacggcgaatagttggccccataggcaggccagccagaccagaatcacgatggctttcaacgcgagcaacacccatcggttcatgtagtttttcatagcccggtcctttcaggtgccgacgttttttggcgacaccgcgaacatcgatatgactatatcgaaaaacgatataccttgcaaggcgtattgcgtcaaccggcattggtcgctcgtatacatataggcttcggcagactgtcagcagaccgtcagctcaacggagcgaacgccatatgagccacccattcgcgcacgagcgtgatgacggcttcgggttggtcgatgtgcgcgttgtgaccggcattgtccagcgtcacgaaggtggcgttgggatagtgcggcaacagggcttgctgatcttcgtatccgacgatctggtcttgcttgccggtgacgatgagcaccggacccgcatatgtgccgagcatttcctcgggattatcggccagccaatagcgctgatccagtcgttcgcatgccgcacggtcgcacaacgccacgccgggcaggatgaaccgttggtagcgtcgccacgcgtcgaatgactggttgacgcccatggtaatgaaatcgaacacctgttcctgcggcaaggagtgcgtcagcttgggattgggctgtgcaaccacatgttcggccacatgccggccggcatgctgcgggtccacgaccggcgcgatcaatgccataccggtcactcggcgaggttcgcgcgccaatacttcgcggacaagcgcaccgcccatcgagttgccgaccatggcgaatggagccgctttaccgacaagaccgtcaatggccgtttgcagccaatccgccatttccggcagcccgcaggcatgctcgggcaatgccggcgtacggccgaaaccgggcagatccagatatatacggcgaattgaatcattgccgtcaaacgccttgtcgagcatcatcagcgaacgatggtccacacccatgccatgcacgaacacgacgggcaatccatcatcattgccctcaatcgcgcagtacggctgcaattgcgccatgtgttcctctccttcaacccggtacaaatcgcctttcacacaatagcggcagcagctcccttggtgtcggagcaatcccgaccgccattctcggtttcgaggggctgatttgcgcggatgtcatgaagcgtgaagacttgtcacaaagtcgcgtgatgacgcagccgccgttcaggtggatatgccacgctgtcatgatgacggccgagccggaacacggcaaatcccgcatgctgcataggccagccggtcacggtcagccatgacaccgaaatattggaggcgcaatgggacaacaggtgcggtacggcagacgccgctcccatggcgcgggcgcgctgattgcagccgtcatacttgttgttgcggcgctgatcgcggcatggacgctgctgccacggctattcacgcctcgcgagaccgcgcgcacggccgaggaagcatattgcgcggcggtgtcgtccgacggagcccgccgcaccttgacgcctgatcaggcgcagaacgcggcgctgattgcgaacatcgccgtcacgcgcggactgccggatcacgcggcgacggtggccatcgccacggccatgcaggagtcgaggctgacgaatctggactacggcgacttggattcgctcggcctgttccaacagcggcccagccaaggctggggcacggcggagcaggtgtccgacatgacctatgcgacaaacatcttctacgatcatctgctgcaggtgccggattgggagacgattccggtggaggacgccgcgcaggaggtgcagcgctcaggctacccggaactatatgccgcatgggatgcgatggcacgcgcttgggcctcggggctgaccggtgaacggtcggcgggcgtcacgtgcgcgttggagccagcaacctcctcggacgcggacgggttggttgccgccataggaggtacactgccgaatgtcaatgtctcggttgtgcccccaaatggcaaaaccggcacgaacaacggcgctgcgaccaatacggccagcacaacgttgacgatcacgctgccggacggcctgtccgccgacaaccgcactcgactttgctggcagacggcaggctggctggtcacgcatgcacgtcaatacggcattgacgcactgcacgcggacggcatggattggaaccgcaaagccggcacatggatcggcaccgaaaccgccgagcagaccatcaccttcacgcttgcgtgatgtgacctataccgccgttgcgaccacaaatccgactggttggagcctacgccgtcgatgccgcctgaggcacgatacggatatgtttttactcgttcgaatgagcccaatccacgacggcttcgatgttattgccatccgggtccagcacgaatgcggagtaatagccgggatggtacgggcgcggaccgggagcgccgttgtctcggccgccggcggcgagcgcggctgcatggaacgcctgcacggcttgctgactgtcagccaagaacgcgatgtgtgtgaccggcgtgaccggcgaagcctccgcctccagcccttcaatcggtgacacgtagaaatcggagtgcagggttccgtcatccacgccgaatccgagcgtaggctcatgatgcgccttgacgatatagccgagcggtgcgagcgcctgtttgtagaatgtgatgctacggtcgatgtctttcacgtgcaacgtcagatggtccagcatggtcttggtcgccctcccctggttcttgtattcgattgctgcttgcagtgtaagcccgaacgtttcccacagggccgcgcatggctatgatgagagcaatcgcacgtcgagttcgagacaatattcaaaacgaatccaaggcaataaggggaatgacgatgaccaaggcactgattgtggtggatgtgcagccgacgttctgtgaaagcggcgaactgggtgtcgcaggcggcaacgcggtcgccgagcggattgccgattatgtgaacgcgcatcgcagcgagtacgcgtatatcgcaaccacgcaggactggcatatcgagccgggcgcgcactggtcggcggagccggatttcgtggacacgtggccgaagcatggtgcggccggcacgctgaacgccgaattgcatccggcgatcaaggcgctgaatatcgagcatcatttcaagaagggccagtattcggcggcatattccggttttgagggtatcgaggacaataccgaccgtatccagacccgcgaggaggtcgaggccgagcaatccgccggcaagacgctggccaacgcgctgaaggccgccggcgtgagtcgcgtggatgtggtgggcatcgccgaatcgcattgtgtcaaggacaccgcgctcgatgccaagaagctcggcttcgaggtcaccgtgttcgaggatctgaccgtgccggtcagcgaggaacttggtgttgcggcccgcaagcagatggctgcgggcggcatcacattggctgagtcccgctgatcgggccggatatacccagagcgaagcacacagccgtagcatcaatcacgcgcaagattcccacgccacccaacatagcccgcccgcctcgaccggccgatatcatcggcgaacacgcggaaccgaaccctacatcgacgttcgtttcgtctggtttggcccatgaattctgcatgaattggggtgaactggcggggctggaggcgagcgggcggcggattatggggcacaatggtttcaaggaggccgccatggtcgatgactatactgccaaaatgactgagctgatcgaactcatgcgtctgatcggcaacgatacgcaacagtgcgaggtcaaggaatgcaagcgcaagatctcctcgaccatcaccgatacgctgtccgcgttctccaatggctccggcggctggattatcctgggcctgtccgaaaagaacgggttcacgccggtcgagggattcgacgcgcgcgccatgcaggaggcgctgagccaggcgtgcgagaagatgacgccggtggtgcggcccgtgatcgtcacctgcccgttcgaaggcgcgaatctggtgttcgcgcgcatcgacgagatgctgccgcgcgacaagccctgcttcaccaccgcgctcggaccgcacggcggctcgttcatccgtaccggcgacggcgaccggcgcatgacctcctatgaggtcgaccggctcatcgaggagcatctgcagcccacatacgatctggatatcgtgcccgacgccacgaccgatgacctcgacccgcagcttgttgccggactgttggcacgcgtgcgcgaacagcatccgcgcgtgttcgccgaccgagacggcatcgatgtgctgctggatctgcaggtgttgcgccatgatgattccgacgagtcggaggtcggcggaatcctgcgccccaccttggccggactgctggcgttgggccgctatccgcagaagttctatccgcggctcggcatttcgattgccgtgtttccggggacgagccgggacgatgtgttccggggtgacgaacgattggtcgcctcgaagtcggtggtcggttcgattccggtgatgatcgacgatgcggtcgactcgttgatgcgttggattggcgcgaagaagcccgactatccgccgctcgtgttgcgcgaggcgattgcgaacgcgctcacccaccgtgattattcgcccgatgcgcgcggcacgcaggtgcatatcagcgtgttcaccgatcgcatcgagatcaccaatccgggtggcctgtacggcatggtgacacatgatgtgctggcgagccctcatccggtgacgggcgcgccgttcgtctccacccgaaaccagttcctgttcacgctgctggagtccacgccgtatccgggcggcgggtttgtgaacccggaaggcggcgacggctaccagcgcatcgccgccgcgttgcgcgaggccggcatcgagccggcgaccacgcgcaacgacatcaacacgttcacgatgaccatcaccaagcagcgcacgatggcgaacagttcaccgggcgacgtggtcaaggcgattatgaccgtactggagcggcattcggccatgagcgtcaaggagatcatgcgcgaactgcagttgacgccgctggccgccacatccggtatgcgcgagctgatgaaggaagggcgggtcgcccgagtcaagttcgccgacgacccggcacagcggtatcggttgaaaggctgatttctcactcggccagctgcgtggtggcgggcgcggccagggcggggcgggatcggcggaagcggccggcggccaggccgatgcagatgaacatcacaccgaacagtgcgaccaatcccagcgagccggaccagccggcgacgcttatgccggtttccgccgccgtgccgaagccgagcgcgttgtcgatcgcggtgcaataccaccagccgggcaggaacttggctatggtcaccatcacgccgggcatcatgtcaatcggcaatgcgacacccgacgtgaacatgatgagcaggccgaagatgttggcgaacccgttggccgcctcttccgagagcccgaactcgctgagcatgaatccgcaggcgacggtcatcagcgcgtacacgcaggtcgcgccgaacgtcatcagcactcccccgacgctcaggtgcaacggatcgagccccgccgccatcatcagaccgattgacagcaccaaatagccgacgcatacgacgagcgcgaatccgcccaacgtcagcaaccgctggagtcccatcaggaccatgcgtcggggcgaggcggtgagacgccgccgcacctcgccggtggtgaacgcgcccaggatcatcgatccgcagatggtcatcgccagggacagcgggtacagcgcggttttcatggtgccgccgaatccgctgaccgccgtatccgcagcgcttgccgactcctcggtcggcgtatcgaccacggcgatctgatggttcacgtctgtatcgctggccgattcggcggccattttggcggcctgggacagatccttgatatccggcttgtcgacttgcccttccggcagcgagtccagcatgtcttggtccagactcgcgccatcaaaaccggcggcccctcctgtagcgttcatcatgccggcgagcgccgcctggtcgaccctcgtctgcgcgccgatcagtgcggtgcgggtgagcgagaggaacccgccgacgttcatccgcgccatcgacccggagccggatgcgtagctggtaaccgtgtccacgttcggcggattgtcgccgtccgccgccgcggcgacataatcgtcagcgaatccgtcgggaatgatgacgatcaggtccacccagttcgaggcgacggcctgttgcagcgtttcgctggtgtcgtcgaggtccaccagttcgctggaatcgcgcaggtaggcgcgcatcgacgtggcgatatcaccccggtcggagtcgcggtcgatgatggcgacgcgcgtcttggtcgattcgaacaccgcggacatggagccggatgcggaggtcagcatcgcccagctgatggacatcatcaggatgcctatgaatacgaggtagatcatcaggtagacccggtgcgcgaacagcacgcgcagcgtggctttacaggtgttcataacgttgcctcctcagcattgcgatgccggccaagaggaataccgcgctcatcgccagcagaatgatgcaggtggtgatgaacggccggtagctgtcgtagtacaggatgtcgtagaacaggttcgtcacctgctgtgcggggttgatggtgccgagtatgggcgcgttgcgggctatccagtcgctgatctgcatggcaaacccgccgtacagtccggtgaacagcgacagcgtgcaggagatgccggtcgacagcccgtatttcgtgttgtacgagagcttcggcaccgcaccgagcagggtgcctgctgagctggtcatgaacgaggcgatgatgaccgcgaggatcgccgccggttcgcgtccgccgagcgagacgttgcaggcgagccggatataggccaatgcgatggacagggcgaccgacgagcacagccagcaggagaggaagcccgcgacgagctgtttggcccggctcagcggcgctacggtccgccgtatgcccagcgcggacaggttcgcctgtgcggcggcgactgtgctgatggagtatcccatggccatcatgcaggacatggccagcagcgcgtaatagtatcgggcgatctcgtcaggctggaaatgcgtgagcgtcgtctcatgggtcatgtcgacgttctgcccgacgctgttccagaagttccggctgagcgcggcctgtggattgtcggcgatggtctgccgggtaacggcgtcggtgcggttgtacaggtcgatgacgctgcgcagggccgcgaggctaatgtccagtccgctgttttgcgtggagtccttggctgtgacggcggtttcccggctcacggtcatcgccaatcggccgttattgtcggcggtcagatagccgttggcagtgccgtcggcgagccgttgttcggcctccttcacggtgtcgactgtggtgatggtcagcagcttttggtcgatttcggcgtaggtcgtgtcgtctgaggccgattccgtttccccggccagcgcgtctacgaaggtgcgggcaccgtccgcctgctgccaacgggtgtcttcgatgacggccatcggcaccggcttgagttcgtatgcttcggccagcccgccgaacagtccgttgaacatggtcgccagcacaatcgggaacacggtcatccagaacaacgccgaccggttacgcaagttcgctttcaatgcgaccagaaatgtggtccacatgatgtctccttactcaggaactcccctcagtcacctttggcgacagctcccctcggagaggggagccaagttatttgcttgccgactgaggggagcatggtcagtccctcagtgctttgccggtgagttcgaggaacacgtcgttgagggtgggcgggcgactggtcaggtggccgatgttggcgccggagcgtttcaccgcgtcgagcacgtcggtcaggttgtgttcgccgcgacggcatcgcacgtcgagttccttgccgtcgtaggtggcttcgatcacgcacggcagcgcacggacctcggccatcgccgaatccgccagatcgagcgtttcgatggtgatgcgctcgcccgtgtcgatcatgttcttgagctcgtcggcggttccgagcgccaggtgccggccgtggtccatgatgaggatgcggtcgcagatctgttcgacctcctccatgtagtggctggtgtagatcaccgtggcgccggcctggttgagccgctggatgccttccagaatcgaattgcggctttgcgggtcgacggcgaccgtgggttcgtcgaagaagatcaggttaggcttgtgcgcgatgccgcaggcgatgttcaggcgtcgcagcagaccgccggacagtttgccgggccggaacttgcggaagtcctggagtccgacgaattcgatggactcctcgaccagcggcgcgcggtcggttttcttcggcacgtacagcgagcagaagtagtcgatgttttcggtgacggtcagttcgttgaacacggccacgttctgcggcacgatgccgatacgacgtttcagcgcgtaggaggtcggcgtcatcggctggccgaacacgcgaatcgtgcccgaatcgtaggtgagcagcgcgaggatgcagttgatcgcggtggttttgccggacccgttcggtccaagcagcccgaaaatctcgccctggttcacgtcaaggtcaaaatagtcgagcgccaccatgtcgccgtagcgtttgaccagttggctgacgtgcacggccagagccgggttggttgtcgagtcgtgttcggaagctctgttgtcggttgtcatagtcactcccttccttggcgattccatcatcccaagaaggggccggacgccgccacaggcaaacgtcacgacttggccgtacaggcgtgacatttgtcattacagtccttcggcgtcggtctgcatggccttgtacaccttatcgaccggcatcaggctgatctcgtccatcgaatagttggacgccctgtggctttgcgtaatcatcggtatcatccctttacggttgtgtcgacgacatccgacgcttgtgcctcatctattcgggaagtgtaagcccgttgtcttggaccgtcatgcgggtaattccgcacgcccgtcaagttcgtcgtgttccgcacaccgctagactggtggtggaagagcgtcgagccggggaggtgccatgcgcgtgttggccgagatgggcttgctactcgtgttgggcctggttgtcgggctacggtccgatggcgtgttcatcgccggcctgctgttggccgtttccgtcgccggattggtggaatggctgcgtcccgcgcaatggtcttgggtcttgtgtacggcgtatctcgtcatcgccgtggcggtgccttcatggtgcgcgttcatgccgctcatcgcctacgatactgcacggctgccggccctcgcctcgaccggagcccgggctggggcacggactgcggcaagtggccgctcccccagtgtctcgcggaccgcggcctctcgccgttcccttgccgatgcaatgcgttcggccccgtggctttcggccgccgcgcgctggatatgggtgttgccgctgatcgcgctctggttcgcccgtggcaccgaccgtctccagacgctggtgatgacgctggtcgccctgcttggattcgttctgggccgggcccgcgcctcctcggacgaggcgcggcgcgcgttgctgcacgcgcaggacagggcgcgcgaatcctcgcgggccactcgttcgcgcatcgccgacatcgatgaggaacgcgcccagtcgattcgcatggcgaccctcggcgagcgcacgcgtatcgcccgggagatccacgacaatgtgggccatctgctgacccgcgcgatcatgcaggcgcaggccggcaaaacggtggccaaggcgacgaacgatacggtcgctgcgcaagggttcgccacgttgggtgcgacgttggatgatgcgatgacgatggtgcgccgttcggtgcatgatcttgaggatgatggcactgatttcgccgcgcagatcgatgatgccgtcacgtcgttcgacggcatctcccccggtttcgccgtgacgctggccaacgatatcgccaaggcgcctgcgccggtctcgcgctgtttcgcgaccgtgattcgcgaggcattgtcgaacgtggtgcatcacagcgcggcgcgcgaggcgagcgtgacgttgcgtgacttccccgcgttctggcagttggtcattcaggatccggggccggccgtgtccgagtccgatgggtcccggacggccgctgcccgcccgcgtgcgatgcgcgccacgcacgtcggctcgcgactcgccgccgacggcgttgccgatatgcgtggttcggccgatgagctaatgcgcggcatgggtttggcggatatcgaatcgcgcgtgcgcgcccttggcggcaccgcggtctgcgggccgtatgaggacggctggcgtgtgttcgtatccgtgccgaagaagcgttggaccatggaatcgagggattgatgagaatcgcaatcgtggatgatgatccgatcgtctgccagtcgttggagacgattctgacggccaccggcacggccgaggtgctatggatggcaaatgacggagacgccgccgtgcgccgttatttcgagacaccggcgagccgaccggacgtgctgctgatcgatattcagatgcccggcaccagcggtttggatgccgcgcgcgagattctggccacggacccggccgcgcgcatactgttcctgaccacgtttgcggaccagtcgtatatcgcgcaggcgatgggacttggcgccaagggctatctcatcaaacaggatgtggcggcggtcgggcccgcgctgcaggcggtgatggccggtcaggtggtgctcggcgcggaagtgctcggcaagctcaccgaacgaactccggatcctgccgattccgacgattccagagataccgccgattccatcgagggcctgcttggcgagcgcgaacgtgagatcaccgcgctggtcgccgagggcctcgataaccgcgacatcgccgccagactgttcctgagcgaaggcacggtccgcaatcgcatcagcgcgatactggacaagctcggcctgaccaatcgcacccaactcgccatcctctggctcaacgcccataggtgagggggcttttggtcaagtaggcctctccctccgacatcgcttcgcgatgccacctcgaacgcgattcaggacagcttgcagctgacctcttattcgctcgttgtcactcaccctcgcctaaaaacgcctccggcgttttcttcacggctcggctcatcagagggaggttgtgaaaaaccaacctcagctgtttttcatgacgatactgtcgatggtgttggccacgcgctcgcagtcgtcggagcactgttcgaggtgacggtagacgtcatgccaggcgaacacctgcagcggatcggtgcaggtggtgtgcagcgtgcgcatcgactcgatgaacaggtggtcggcgtccgtttcgatcgtgttgatggcgaacaccagttcgcgcaacgtcttggaatgccggaatcgcggcagttcgttgaccagctcgcagatgctttccgtggcgcgcaccaccatatccgacatctggaccgcgtcgtcgcgcatgtcggtcacgttgtcgtagtacatgcggttgagcacgccttcgatgctgtcggtcacgtcgtcgagcacgtggccgagctcgtcgatgtcctcgcggtcgaacggcgtgatgaacgcggtcaccagttcgtccatcatgtcgtggcgcacctcgtccgctgacttctcaatcgcgtgcatgctgtccatgcgttcgcgcagctggcccggattgaagtcgtgcatgacctcggacagcagcttcgcggcctggcatgcgtagtccgcgctgcggcggaatccgtcgaagtagaacgtgtctttttgtctcgccatgatgggtggattcctttctagaacacgaccatgaacagtttggccattacgaagctgatgagaccgcaaccagggaaggtgaacacccaggtgagcatcatgtcgcgcaccacgccgaagttgatggcggagaggcggcgtaccgcgcccacgcccatgatggcgctggtcttggtgtgcgtggtggagacggggatgccgagcacggtcatgatgagcaggcacagcgcgcttgacagatcggccgagaagccttggtatttctcgagtttcaccatgtcctggcccacggatttgatgatgcgttcaccgccgacggacgtgcccacgcccatgatggtgctgcacagaatcatgagccagatcggaatcatcacaccggtcacgctgggttggccattgcagaacgccatgccgaggaacagcacgccgatgaacttctggccgtcctgcgcgccgtgcatgaagctcatggccgccgcgcccacgatctgcgcgtaggtgaagaacccgttggtgcggcggcggtccatgccagcgcaaatcagggtcacggccttgcataccaaccagccgacggcgaagccgaacaggaggcttgcgaccagaccgtagagcaccttgacccattctcccatgttgatgccgccgatgccgccttggatggcgatggccgctccggacaggccggcgatcaggctgtggctttcggaggtgggtatgccgagcagcgaggcgcccacgctgtatacgacgatggagaacagcgccgcgcatagggcgatgagcgccgcgttcgtgtcgccgccgaaatcgaccatgttgctgatggtggaggccacggaggcgttgagctgcgtcatgatgaagacgccgaggaagttgaagatggccgccatgatgacggcggagcgtacgcgcatgcatcgtgtggtcacgcaggtggcgatggcgttgggtgcgtcggtccagccgttgacgaagatgactcccagcgtcagcaacgttgtgacggtcagagccgggttggaaagcacttgttggaggaaatgcgccagtgagacgtccaaggggaattaacaccttcttcttcgggggcggaagccgtcacactgattgtaacggaagaatggctacgtagttcccatggcgcgcgggttttatggtgttgttatgctattgcggcctgtcagcagcaacaactggtattggggtggagacggtcgtattcctcgcgggcgcgaatgaattcgacctcgctcatcggtgtttcgccgggatgctcggccgcgaaatgctcaagataatggtcgtagcgggcctcgccgctgatctcacgcagataccagacgatgccgtgccatacggcaacgagtttgccgagcattttgtctcctttcgctgattattggctccccttgaaaaaaggggagccaatgacgcactacgctgcaacctgcccgttccgcacaagctcatgcagcttggcgctgtattcgcgctgcaccttcttctcaagcgcggtggcgaccaggctggagggcgcgaaccactgggattccacgaacggctcctcggacgtcgtttcggcaccgtacttgccagcggcgaacgtgcgcgccacgaccacgatgccgactaccacgaagacgcccatcatgaccaggaagaacacggagagcacgccgtccagatacgcgttggacagcgcggccttggcgttggtcagcgcctcgccggtcagctcgccggagtcgatctgcgcctgatacttggaggcggtggtgaagtagctcagcggcccgaagatcttctggaagtcggcggtgaaggtcacggcgatgtcccacacgagcggtaccaccggtatccacaggtgcttccagtagcccatcttggccacacacacggtgatcagcacgaagcaggcggcggcgagcagctggttggagatgccgaagataggcaccatcgcgttgatgccgccgttcgcgtcggacacgcccatccacagcagtccgccccacagcgcggtggcgatcagcgtggtgatgatgttgccgggcttccaggtcgggtcggcgaacttcttgagcttgcgcacgttgccgagcatttcgccgatctggtagcgggccacgcgggtgccgttgtccacggtggtcaggatgaacagggcttcgaacatgatggcgaagtggtaccagaaggccatcgagtcgtggccgcccaggtaggacttgaggaagttggccatgcccatggcgaacgtggtggcgccaccggtgcgggagacgatggaggtctcgccgatgtcggcggcggcctgctcaagcgccgcggcgccttcgtaggtcttggccgcgccgttctcgtccacggaatcccaggtgacctgcatctggttgccttcgatgtcggagaccttcatcgactccacggccttgacggcggcatcggcctgttcgcccggcgtggaggtggcggagatgctcacgccggatgcggcggtgatctgtgcggcggacatgttggtggagaagtacacgccctgcgagatggtgatcgcggcgatcagcgcgatgacggcggtgaacgattcgacgagcatcgaaccgtagccgatcatgcgaatctggttctccttctccacggccttcggggtcaggccggagctcaccgcgccgtggaagccggagagggcgccgcaggcgatggtgatgaacaggaacgggaataggttgccggagaaggtcgggccggtggaggtggaggccagttcggtcagacccggcaccttgacggacgggttggcgatgatgatgccgatgacgagcagcacgagcgtgccgatcttcatcagcgtggacaggtagtcgcgcggggtgacgagcagccagtgcggcagcgcggcggcggcgaacgagtagatcaccagggcgatgacgagctgcttggcgtccagtgtgaacacggcggccacggccgggatagaggcgatccatccgccggcgacgatgtcgagcacgagcagcacgaaaccgagcagcgtggtctcaatgacacggccggggcgcaggaaacgctggtagcagcccatgatcagggcgatcgggatggtcataccgatggagaacacggcccacggcgaggcggccatggccttgatggccacgagcgccaggaatgccatggcgatggcggtcatcaccacgaggaagatggataggatcataccgccgaacttacccatttcatcagtggccatctggcccagagagcgaccgcggcgcttggcggagatccacagcaccagcatgtcctgcacggcgccggcgaaaatcacgccgaggatgatccacagagtggagggcaggtagcccatctgcgcggccaggatcgggccgacgagcggtccggcgccggagatgccggcaaagtgctggccgaagagcacgcggcggtcggtgcgttcgaagttcgcgccgtcatgcacgcgctcggccggggtggcgttcgcgtcgtcggtgcgcatgatcttgatctggatgtaataggcatagaagcggtaggcgatggcgtaggagctcagcgccacgaccaggaaccagatggcggagatccgctcaccgcgcgagacggccagaatcgcccatccgcaggcacatacgatggcgatggcggcccacagcagggccttcttccatgtccataccattttggggcgcacgcctacgggcagtcccttcgaattgcgaatcacacgttcggcttcgtccggcgtgtaatcgtccttgaattccaacttgccaggtgccggggcctgggctgcggcggtggtcataataaccctctgttcctcttcaataacctttgcgggaaaggttctcttcattgcgacccttttggggtatctctcgtctgcttatggcactggttggaagcgtagccacggcatgtcgcgcctcaggaaaatgtcccaatatgtgagcttggccacatgttcacggactgcgtttcatgccgattacccgggattcgcaccgcgatgtgcgaaaatggacacggtgtcaatcaggaggtgcacagtggttgtaagcatggattcgagccgcacaatgcccgattgggtgaagtacggggtgttctggcacgtgtatccgctgggcttctgcggtgccgatatcaggcccgccggcccgcgccagttccatggccgcggccttgacgcgataattccctggctggagtacgtgcgcgatctaggcgcgtccggcctgctgctgggtccggtgttcgagtcggcgacgcatggatacgacacgctcgaccatatgcatatcgatgtgcgattgggcggggatgccgcgttcgatcagcttgtcgcggcctgccgggacatgggattgcaggtgatgctggatggcgtgttcaatcacgtgagccgcaatcatccggccgttcaggcggcgcttgacgagaccgccggacgcttgaatccggccgacaacccgtggcatggtctggtccgcgcgcatgtcggtgataatggcgaacccgctttggatgtgttcgaggggcacggggatctggtggcgctggaccattcggctgacgagaccgttgactatgtggtccatgtgatgagccattggctggatcgcggagccgccggctggcgcctcgacgccgcgtatgccgtgccgagcccgttctgggcgcgcgtgttgccgcaggtcaaagccgcacacccgtattcgtggattttcggcgaggtgatccatggcgattacccgcgcatcatcgaggaatccacgatggattcgatcacgcaatacgagctatggaagtcgatccagcatgcgctggagacggagaacttcttcgagctggattggaacttgaagcggcacaacgcgttcctggattccttcgtgccgcagacgttcatcggcaaccatgacgtgacgcgtatcgcatcgcagattggcccggccaaggcggcgttggcattggcggtgctcatgacggtcggcggcgtgccaagcatctattacggcgacgaacagggctatgtgggcgtcaagcaggagcgtttcggcggcgatgacgacgtacgtccgaagttccccggctcccctgccgaactgtccacgctgggagagccgacataccggctgcatcaggcgctgatcgcgctgcgccgtcgcaacccatggctgctggatgcgcgtaccgaggccgtgaagctggaaaacaagcacttcgtctatcgttcgacgagcgccgacgcccagcattccctgaccgtggacctcaacatcgagcaatcccccactttcaccatccgcaacgccgatggcagtacagcgtatcaatggtgagctccctcatcagagggagctaactcattcacctctgaatgcctcggatcagcaggtcgagcaggtaaccgtacgaccggtcgacccgttcgcggccgcgtgtgcggggttgtgcggaacgcagttcgaattggatgaacccgtgtatggacacccagatggaggatgcgattagatgggggtcatcgccgcggaatacagatgctgcctggccgtatcgaatgatctgcgtgatggcgtccaggcagtgctgggccgagtccgacgcctgccccatccagaccagcgcgtaaatgccgggggcgtccagcgcgtgttcacggtagattatgcccgccctgcgcaggcgcagcacggggtcggattcgtcaatggcgatgagctgttcgcgcagatcggtgaagtatgcgtcgatgagcgcatcgcacaccgcctgcttgccgccgatgtgctggtagatgctggtgggcgacacatcggcctgtgcggacagcgcacggatggtcagaccgtccacaccgtcccgttccacgatccgccttgccgcgtcaaggattctcccgtggatttcaagggtgggcgtgcgtttggatcggggctgcgattgcgtcatatccgttattctagggtgcgtacaggccattaccgccgtttcggcatggccacgatcacaacgactgcggcgataagtgcaatcgtcatggccgctaggcaggcgaacaggcatccgcatcgcaaacaccggcctataacacaatcaggcccgacgaccatcaaaggtcgtcgggcctgattcatacgcgctgtcggactaacggcgtccagacttcatacggaatggcgcattgtggcgattcttcttggaatgacggcggttcgggccttccgtgttgccgtatttggcgatcatgcggcgttcgtgacgcttggcaccttctgaacgctcgtcgcgtacgatgcggttctcgttcttgcgatggatgcgcttgccgccttcgccctgacgggtgttgcgcatggactgcctgcggccgtcatgggagcgctcgtcataggagaagccgtaatcctcgtggctgcgttcattgcggcgaggcttgcgcggacgctcgaaatcgcgggaatcggaccgttcgaaatcacggcccgcattgtgcctgcggctgccgaaatcatcgttgcgaccgtatccggccctgtcgcgcttatcgaacttgtcgcccttgccgtaccgatcattgcgacggttcttgccgtactggccgcggccattgtcctgacgctcgtcgtaccggttcttgccgtatccgtcgcgacggtcgcccttgcggcgctcctcgcggcggtcatcgccatgctcgaacagatagtcgcggcgctcggcctcggggttgctcatgcctgcgcggcgttccgcacggttgcggttcttcttcacggccttcttgctggccttgtcgccgtgcttgcgctgcggctcgccttcggcaacaaactcgccgcctgcgttctcgtgctggaactcggtctcggcaacgttctgctcgtcacggtcgcgattgcgattgtgcttgcgcttgccgccgcggccggactcgtcgcccgccgcgttcttggcgcccctgttcttgcccttgcgcgggttgcccacgggctgcgacttgtcgaggctccaaccatccacgcgctcggcgcggtcgcccacaagctcaagcacttcgggcgaatcgtgggtcacttcgatcatcttggtcttgatgccggcctggttcagcaagcggcgcgtctcgcggcgctgctcgggcagcacgagggtgaccacgtcgcccgccttgccggcgcgggcggtacgaccggagcggtgcacaaaggacttcgggtcggccggcggctcgacctgcaccacgagctccacgccgccgacgtctatgccacgggcggccacgtcggtggccaccatgacacgcacatcgccggaatcgaacgcagcgaggttgcgatcgcgctggttctggttcaggttgccgtgcagctcggcggccggaatgccgttctgcgtcaggttcttggcgagcttcttggcctggaacttggtgcgggtgaacaggatgcggcggccttcgcccgaggcgagcatgcgcacgagttcgtgcttgtcgccgcgcgtggtttcgaacacgtggtgggtcatcaggtcgggttcggcggtggccgaatcgacctcgtgcaccttgggatcgtgcaggaaggtgttcaccacttcatccacgccgtgatcgagcgtggcggagaacagcatgtgctgggcgtcgggcgaaatctgctcaagcagtcgcttgaccggtggcaggaagcccatatcggccatttcgtcggcctcatcgatgaccacgacttcgacggacgagagcgtgagcgcctgctggcgcagcaggtcctcaaggcggcccgggcaggcgaccacgatatcggcgccggccttcagatcgcggatctggtggatgtacttgacgccgccgtacaccgtggtggtgttcatgccgaacgtgtgggccagcggcatcagcacgtcgttgatctggttcgcgagctcgcgggtgggggccagcaccaggccgcgcgggtgcggtaggaagtcgtcggcgcggcgctcttccaggctggccttcttgcggcgcttgatttccttgcggaactcctccatcgcgatttcgccgaacgaatcgtaggaaccgaggcgggtgaccagcggaatggagaatgcgagggttttgccggagccggtgcgccctcggccgagaatgtcgcggccggccagtgaatcgggcagggtgtcggcctgaatggggaatgcggtcttcttgtcatctgccgcaagcacgcgcaccagcggtccgggtacgccaagttcgccaaaggtaagggggcgggattccgcgctgtcgttcatctggaaatcagcggaatcgtcacgatcatcgaaattattacggggcacagtggcctttcatgtcaaaggttacgcaaattacgcaagctttccgagcttagcgtaagccccctactttgcttggtgctcgccacactgtcatcccactctttacttatgaccccacggggcggtaacttgcccatggggcggtttgaagaaattgtgaaaccgcagaataaagccattttcacctaccgccccatgagggttttaccaccccatgggatgtttgccgccccatgggttttaccaccacgtaaggcgagcaccgctccatggaacacgcaaatggcccctacccgtgaaggtaggggccattgtgcaaaagggctgagccaaaatacagcccagtagccctaaaacacactacaaaatatccggatcgtctttggcaatagtgccggttgccttgccaatggccttcaggccgtggtaggccacaagaatcacgatcgtgccaatggcaatgccgttgaaggaaatgccaccaacagtgaacgcgaattggccgatggcaatgatcatggtgatggctgccaccatgatgttcagcggcttgtcgaagttgaccttgttctccacccagatgcggataccgatcatgccgatcatgccatacagcagcgtggtcacgccaccgagcacgccggcggggatcgtgttgatcacggcaccgaacttcgggcacaggctcaggatcagggcgaaggcggcggcgcaccagtaggcggcggtggagtacaccttggtggcggccatcacgccgatgttctcgccgtaggtggtggtgccggagccgccgccgaagccggcgagcgtggtgcccaggccatcggccatgagggcggtgccgatctggttgtcgtagtcgcggccggtcatttgggccacggacttgacatggccgacgttctcagccacaagcacgagcacaacggggatgaacatgggaaggatggagaaatcggcctgcggcaggtggaacttcgggaagccgatccatgcggcgtcgccgatggcggagaagtcgacctggccacggatgcaggcatatacatagccgatgatcacgccgaccaaaatattgaggcggcccagcaagcccttgaacagcacggccacgagcagcacggccaacagggtaaccagtgcggtgtcgggcgcggcttggaagttggtccacacggaaggtgccagattgaagccgatgatggccacaatcgcgccgttgaccacgggcggcatgatgatgtcgatccatttggagccggcgtaatgcacgagcacgccaaccagggccagcagaataccggtgaccatgatgccgaagctggcgaccgcaatgcccttgttggcggtggagaccgcggtgatcggtgcaatgaagccgaaggacgagcccaaatagctcggcagcacgttcctgttgataagcaggaacagtgcggtggacatagccgtgaagaacagggtggtggacgggtcgaagcccgtcagaatcggcaccaggaaggtggcaccgaacatggcgatgacgtgctgtgcgccgataccggcggtgcgcacccaagtcagacgttcatcgggctcgactacctcgccgggcgccagcgtcttgccgtcgccatgcaattgccattggaagatattggacattactactctcctcgctctcgcttggggcacggcattcacaaccagccgcaccacgcaccattctagctcacgaagattttgtgaagtctctcttccgggaaaggctatttgccgtaatactccagcaggtgtgggtcgacggcctgcaccacatccaccaaatcgccattggagagatacgggcgcttgaattcgcgccacggctccaccttgacctcccagcggccggtcgtctcgtcgagcacgggccgggcggtctgctcccagcgcacacgcttggaggtgcggccggtttccgggtcgcggcgtgtatagtgcaggcaggtgcagttggtgatcttccagtcgtccgaatcggcgcgatgcaggaattcctcgtcggccaaatcctcgatggtgagcatcagggcgagcatgaagtcgccgtgggtgaccatgaccacggattccgaatcggatttgcggctcagcgaggtcaggatgttgtgcacacggtcctcggccacatcggcaatcgactcgcctgccggcggacgccagtacagcggatcggtgttcttgaaattccagttgcgcgcgtagttgtttttgaattcgtccttggtgatggtgttgatctcgccccaagaacgttcgcgcagcacacggttctcctcccatttggccttgggcagggccatggtggctgcggtttcgcgggtgcgcacgtatggcgagaccatgtagcggtcgaacagctgctgctggctgaccagccagcggccgatgcagtcggcctgcttgcgtccggtggcggtgagtctccaggagcggtcgggtacggtgacgttgtcctgcgtgtacagggaattgtcgccctgctcgcccgcctggacgatgacgttcgcttcggattcgccatgccggattacgtatagatcgagcggcatgctcatatatgttcccctttcgttattggttacgttgtgttgttttctgttgtttcctacttgacttgcgtgatggtgttccccttgaccatgaacgcgtgccgggccatgtcgatcatcggctgatcgaatttggagtcggtgtagaactcgtcgatgacgacgtccggaccgtacagttcgcggaaccgtttggccttgttggtgctgaagttgaggtacgtgaccttcatcgtccccacatccacctcgctggccacgagattcctcacgccgagtctgcggcaggcctcccccaccgtcagatcgaaggatgcggtgaggatcacatcgtccgactcaggctggtaccaaggcttgatacgtgcgtaatatcggtcccagaaatcgtccacgagctgttcgacgctcgccacccgtttggatcggctcagttccgtgagatagccttcggtcatcttgcccacgccgtattccatctgttcaagcgtggcccggccaagcttgtatttgaccgcgtaccgcagcacgggggcgatatagcggaacactttcgggtcgtggcgggcggaatacaggtacaagtcgaacaggctttcgccatcatagatggttccgtcgaaatcgaatacgcgcataccttctgcttctactctgttattccttgtttaaggctaatctcggtaagccggcgaaagcgcaaatacgcagtgaatttcacatgaacactgttttttggattgatttcggtacaggtaacgtacactggtgacagcgtggaaggaggtgcgtaatggcgacgtctgaaatcgaacaatggtggattgataagtttcaggagaacctgggtccgattcgcaaggtagccggatggacgactcagcaactggccgacgagctgggagtcgcgcgacagacggtgtctaacttggagaccggcaaaagcccgatgaccaaactgcagtatctcgctttacgtacggtgttcagcgccgagatcgcacgtcgtgaagaccgcgatctggcacgcatcatcaagactttggtcgacgatcccattgagcaacgcattcgcgaacggcgcgcccaagagcaagacggcgaggccgttgccgacaatgccccagtcaatacaggctgtggcaacgctgccgacaacgccgccaccgagaaacgcaagcccagtgccgccacattgaaggcttcaaagactgccgcaacgggcaagcccacgctcagcacggcgatgcaggctctcgccgtcatcaccggcgcattggccagtggaaccgccgccggcatcatcacctacttgatgttcccggacggcggcccgaacaagcgctgagtcgccgaaatatcgaaacggattgaacaacccagttcgaagccctgagcaccattttgtccgtgtcgcaccagcgtttccctcattatcagctgtttcgagttgcatgaatgcaccgtttataggccgagaatttcgtgcttttttgcatcaaattcttcttgggagagaatgccgatatcaaccaattccttcaatttcttcatcgcctcgacttgttcttccacagacatggatgccgtgtgagaggcgggagcagcggcttccggtgccggcgcaggtgccggcgcttgaaccggggcggcagtcataggattgatggcttgcgccatattcataccaagcaacatgccgccatcgccaaagccgttgtcttgaataccttgcgcaatgcgctgctgggcagccatattgccagcttgttgggaaacgccctcgtatgcggcaacattcatcttattcgaggcgaactgctgcacgagctgacgtgattgctcggtgaactcgatgctttcgatgcccacgctggacacttcaaagccaaaacgatcattccatgtaccggcattggctcgatcgccacgcacgcatgctgcgatgtcattcgccttgccgggcaattgcgaaatacgatattcattggacaacgaattgatggccacaataaacgactgtacgaattcggacagaatctgcctacgtggcccttcatcatcgaatgaatacgacacggtagtggcaggcacaaagttacgaacgaatcgaactggatcagtgacctttagcgacatggatccgcgtgcgcgaatttccaaatcgacgccatagaaccggtcgttatacaccagcggcgcagaagtgccgaatttgatgccacgaatctcacgcaggttgacgaaggccacatatttggtgcggccaggctgacctccgaaggtgaatcgatcggcgacctggttgaagaacgatccgatgccgtctccggcgagcacgctctgttccccgttgcgatattcataaccgcccgactcggtgatgacgttttcgatacctgtttcagagaaaatgaacgccgcagtattctctggcacatagatacgcgaaccattggtgattattccctcggaaccgtattcattcgaaccgcgatcgttgttgcttccgcggggaatgcccggcacaacgacggtgtgttccgtgaacggaccagcggtgatgatatcacgccacaggtccgcgaatgtaccgccgagcgcgccggcgaacgccttaataactgccatctgttttcctcgatatctcaatgcacatggccggtcttgcgactatgcaatcgcaagaccggccgttatgctggcatgttggctatagctgcgtttcgcgatcgcagtattcgcatcgaacgacttctttgcgatgaccggaaagcggagcgccacaaccttcacaattcaccgaaaccacgggttcggtaatcccaagcccactacggaatgcgctaaaagtgtccttcagcgccccggccagagcctccgttccggggatggccttgttgaaggccggctcatccattggcgtgtactgtctgccgcgtatacccatataccgtcatcgtccctttcttggaaaaccgttacctcgatacgccagtctgatcactggcccaccgatgcgagcttctgcgtgcatcgagtcatgacctcggtgtagtaggccaaatcctcactgctgagggagttttcgtcaatggcgtctaccttctgggagaactcagagtaacgcttcatcatgctggcatagtcggtagccatgctgaccacgttatcggatttctgatatttgttcatgaaggcaacatactcatcgataaaggcctcgtagctgtccatcgtggccttgaagtcagcactgtcattggtgttctgctgcgccttctgatccgaagactggtcgctctgcttgttggcatcgctggaatcagtgcccgtatcagtgctcttatcatcctgcttcgcggcgtcgccgtccgtagacgtatcttccttcttttccggaacctggatagtgatggacatgatggtctcgtcgtcagtgttacgagaaacgctcacactgtatccatcggcgttcttggcattgaaactgtcagcggacttgctatagtccacggtgaaaccgttgtcttgcacggacttgacgtagtcggcatactgcttggcgtcggtaccgcacacctcgatgtggaagtagtccgaagactcacttctaatttcaccctttgtggatttcggctgcggcagcagcgccgcgatatccgactccggccatgaatatgcttcgcacttggtggcgagcgatgcttccaattccgcccgatcagccttggccttcgcatcgtcacgaattacgaacacgccaccgattaccagacccacaacggtgataccgactgccacccaggccagcactcggccttgcaccttgccactcgggcgggtcacgtatacggcgaagcctgagagcagtgccggaatcaccgtggcgaacagcagtccgccccaggatcggccagaaacatccacaaattgggcgagtacgaacaacactccccaaataatggcgaacacagccagcttggaagtcttcttcaccccttgtgcattcggatcaatcacggcaggcgcagcggcaccagcaaaaccagtggcagcaccggcaccatgtgtggcgggtgcaggagccacaccaatacgcttgtccagagcggcgaggaactcatcaacgcgcttggcgctttcgtttccagtcgcctccagacgaatggcggcccctgccgcaccctgcgggactacggttagcgtgcagttcaccccatcataggagtggaaggaaaacgctccggtctgggtgttttcgttatccaaggtaaacgtggcgccagtagtcagctggtcgtgaataacttggaacagctgttgcggactgaccgcatatacacgatcaaatggcgcgccggcgggccgctgcgatgccgtagccggagccatcggagtggtggtagcaccatcagacgctacgttcggttggccagccggtacagtattcggcacggtaggcgcattcgcgcgatcttccggtgcgtcattcgtgccttcggacggtggaaccggctgaggttgttgatcaaatggcgttgtcatgatgcccttctttccttaagcagcagcattaccagcacagaagaggcaagcccggcaaccgttacggtcaatccgactgccatggcaagccggtatcgttcgctcatcattgcgtcccttcttattgctcgctttgctctgcgatacatcgaaaccagtgtatggcgttgttattatgtacgcaaattagcattttgtatgcatattagctttattgtcgatgcttgataccgcgcatgaacatcctttccgccaccgcacctacacggatggcatcgaccattgtcggcgacacgcgcgggccatacatcagctgacaactgaatttttcggcgtgtttccgaaaagtcggcgtcctgtacgctgggaatcgagcaaccgcgtacgctggcgcagcacagcacccgcaacacagcgacaaggagcatgggcaatggcagacatccccgaagaacatttgaccgaggaactgttggatcggctgctcgccagcgccagcattgagcagtatctcgatgagggactcgtcagcgcacgcacgctgaccgactatctgttcgaccgtatggaagcccatgacctgagacgagccgacgtggtgcgggcatccggcctcaacgccacagtggtttatgacattttctccggcaaaagccgccccggccgagatcacgccattatgctggcttttggtctcaagtgcacattacgtgaaacccaacggctacttcgtcttgcaggcgtttccgaactgtggtgcaaacagcgacgcgacgcgattatcatctggtgtatacgcaatggattcgaccgcattgccacggacgacgagttgtatcgtatgggagaggcgacgttgctaccggccgattgacgacattcggcccaacaacactcaccagtgagacgcaagtaagagggcatcaaggagagacatggacgataagcaggcgatgcatgcgatgagcatcgacgatgcgtaccatgtcgagcgtacgctcgctcgcggaccttccggcgtcaccgaactggtgagcattgacggcaacggcccgttcgtacgcaagaagattccctctcccctagcgcaacgcaatgtgtgggcggcgctcagcgcctgccagagtaatcgtctgccgcgtgtggaagcgacgtacgagctgcccgaccggttcgtcatcgtctacgattacgtgccgggcagcacgcttgcgcaaattgcggaggaaaacgggcggcttgcaccgaatgtggccgtgcagcttatcgaccaaatttgcgaagccgtgcaggagcttcaccagcacggcgttatccaccgcgacatcacgccggccaacgtcatcgtggcccaggatggcgcgcatctcatcgatttcggcatcgcgcgcatccggtcagaggcaagcaaccgttcacgggataccacggcgcttggcacctacggattcgcctcgcctgagcaatatggctttgccaaaaccgacgcgcgttccgacgtattctcgctgggccggctactcggattcatgctgaccggcgtatatcccgatgccagcgactacgagcagcgacttgccgatgatgccgcagtaccggctcgactacgcgccgtcatcggctatgcgtgcgcattcgagcccagcaaacggccacagagcgtccaagagtttcgccaggcgctgttctcccagtccaatccgcccataccgaacgcatcatcggcaaatccgccatcaacgagaacaacgaacggcagcgcgtcggcgtctcgactattccggcgtctgcacttgagcaaacgcgccatcgtgctgtggtccattgccggagcggcactgataatcgccgccattgcgggaggcattgtgttggcaggccaacttggcattatcgggtcggcaacatcacccgattcctcgacacaatccagcagccaatcaaccgataaggccgatggcgggcactcctcgaacgggtcaggaaccgacaatgccaatggcacgggcggagtaggcggcactgacggcgctgatggagacaatcaagacaccgtcaccgacaatcctctgaaaatagtggaatccggctggtcggcggaccagcaagggtatgtccactacgctttcgccctgcgcaacaccagtaagacccagcaggtgcagtatccgcagattaccattacggggcgggccaaagacggttccatcgtgttctcgcagacgcaagcactgaatatggcattcccgaatcagactgtatatgacgccggccaagcgggcgagggcacggccccggccaccgtagatttcgttgtgcttagccctgatacgtacaacgtcaccgaggctcaaggaaccgccgccttccccatcagtggaatatccaaaatagacaacagggacggcggcacgacgttcaatggcgaggtccgcgccgtggcagatggattcaagccatctgatggacagcaaatcaagatttccctagtactgcgtaacgcacagaacgcaatcatctatggagatatcgcattcgtggattggccgggcaatggccgatccacgccattctcgatcaccgtctacgatctgccgaagtatgtgtcttacgatctgtatgcgcaaatctggtagttgactttacgtctggcaggtggccgtcaggtgcctgtcaggccgctgttcgcgtcacctgcgcactgacgttacggcgcgcctggccgaacagatagatgccgatgggcagggtcagaacaccgccgatgatgaacaccagcgaaatcgggatcacgtcggccagtggcgcgaagatcaacatgccgagcggcattccgagcgcgctcagggtggtgtcaaggccgaatacacggcccaccatcctctcatcggcctcggtctggatgatggtgcgcatcgggcccgtgcagatggccgaagccaaaccgttcaccacatcaatcagcaaatacgccagcagattgtgaaccacgccaagaccaacgacggagacgcccaccagagcgatgccgaaggcgaccacgcgcatgttgttgcggatgagcttggcaccgatggtagacatcagcgcgccgccgagcagcataccgatgctccatcccagctcgttggcggcgagtttatcggaggcggtggtcaggttgatgaatccgagattcaaatcgatgccctcatattcgcgggtcatgagcaacagcgtaaggttcatcggcgccacggacacgaagcacaccaaggcgccaccgagcaccacgttgcgcaggttcgcccggcgccatgtgtagctgaaaccatctttcaagtcagcaaacacacgacggacgctggcaatcagcgaacgatcagcattggcatccgacataggttcgagtgtgggttgcccgctattctccgcttcagccatacgcctcgcaacatgttccgcgctcttcttcggcgctttgatcaacgccacaaagccgacgccgataatggccgtggtcacatcgactaacagaatcgaccacagcggcactgtgttgataagcacagcagccaccgcaggtgccacaatcgtattcgccgaattaatcacgccgtatattgagttgacgcgcaatagtttgcccgagggaacaacatccggtatgaacgactgcacagcgggcgtctgcaccccgcctcccgccgaacgaatgaacagcaccacgaaaatcatggtcagactcgcccatcccatcgcgaagctcagcgacagcacgacggtgaccacagcaatcaccatatccggcagcataatcagcaacttgcgactgtgacggtcggcccaggagccgccgaagatcgagaccacggcctgcggcaccacgccgaacagagtggccagcagcatcgccgaaccggttctggtctgcaatacgatccaccaccagatggcatactgcacgatgctggagcccaacagcgaaaacgcctggccggtgagtagaagcactacacggcggatccacgcacgctcggattccccgttggccactgctgcggcataggcggcaccgggtttgttcgcgctatggaccgctgcgcgcgcattcgcattgtcatcgccggaaacctcgggtgtttcgcgcacagttggttcagttgttgtactactagaagacatacgagtgttctcaattcttcaattccactacaaaggtcacatcacggcatacgcacgccgacgcgcgtatgcgtgcacgactccagcaacgagccgtacccgccgttagatggcaggcttcagtatcgtgacgccatgcgttagcgtcaccatgcaacgagaggaacacactattcaatagtatatcatgaagacgtgacgttgcccttgcgcaggtgccgtaagactccgcggacaaagcaatgaggcttcccccgcgagaagggaagcctcatattccattcattctattcagcgatgatgacgcctaatcaccgatcatcctttgggaacagcgcatcgaaggcatgttccatcacggacttacggcggatcacaccgacgagtctgccatcaccatccaccaccggcagtttcttgaactgcttcttggcgaggattcgggccacctctccgacatgctggtccagaaacggttgattttactgtgctcaatccggatacatacaacgtcgccaaggctcagggaaccgccgccttccccatcagtggaatatccaaaatagacaacagggacggcggcacgacgttcaatggcgaggtccgcgccgtggcagatggattcaagccatctgatggacagcaaatcaagatttccctagtactgcgtaacgcacagaacgcaatcatctatggagatatcgcattcgtggattggccgggcaatggccgatccacgccattctcgatcaccgtctacgatctgccgaagtatgtgtcttacgatctgtatgcgcaaatctggtagttgactttacgtctggcaggtggccgtcaggtgcctgtcaggccgctgttcgcgtcacctgcgcactgacgttacggcgcgcctggccgaacagatagatgccgatgggcagggtcagaacaccgccgatgatgaacaccagcgaaatcgggatcacgtcggccagtggcgcgaagatcaacatgccgagcggcattccgagcgcgctcagggtggtgtcaaggccgaatacacggcccaccatcctctcatcggcctcggtctggatgatggtgcgcatcgggcccgtgcagatggccgaagccaaaccgttcaccacatcaatcagcaaatacgccagcagattgtgaaccacgccaagaccaacgacggagacgcccaccagagcgatgccgaaggcgaccacgcgcatgttgttgcggatgagcttggcaccgatggtagacatcagcgcgccgccgagcagcataccgatgctccatcccagctcgttggcggcgagtttatcggaggcggtggtcaggttgatgaatccgagattcaaatcgatgccctcatattcgcgggtcatgagcaacagcgtaaggttcatcggcgccacggacacgaagcacaccaaggcgccaccgagcaccacgttgcgcaggttcgcccggcgccatgtgtagctgaaaccatctttcaagtcagcaaacacacgacggacgctggcaatcagcgaacgatcagcattggcatccgacataggttcgagtgtgggttgcccgctattctccgcttcagccatacgcctcgcaacatgttccgcgctcttcttcggcgctttgatcaacgccacaaagccgacgccgataatggccgtggtcacatcgactaacagaatcgaccacagcggcactgtgttgataagcacagcagccaccgcaggtgccacaatcgtattcgccgaattaatcacgccgtatattgagttgacgcgcaatagtttgcccgagggaacaacatccggtatgaacgactgcacagcgggcgtctgcaccccgcctcccgccgaacgaatgaacagcaccacgaaaatcatggtcagactcgcccatcccatcgcgaagctcagcgacagcacgacggtgaccacagcaatcaccatatccggcagcataatcagcaacttgcgactgtgacggtcggcccaggagccgccgaagatcgagaccacggcctgcggcaccacgccgaacagagtggccagcagcatcgccgaaccggttctggtctgcaatacgatccaccaccagatggcatactgcacgatgctggagcccaacagcgaaaacgcctggccggtgagtagaagcactacacggcggatccacgcacgctcggattccccgttggccactgctgcggcataggcggcaccgggtttgttcgcgctatggaccgctgcgcgcgcattcgcattgtcatcgccggaaacctcgggtgtttcgcgcacagttggttcagttgttgtactactagaagacatacgagtgttctcaattcttcaattccactacaaaggtcacatcacggcatacgcacgccgacgcgcgtatgcgtgcacgactccagcaacgagccgtacccgccgttagatggcaggcttcagtatcgtgacgccatgcgttagcgtcaccatgcaacgagaggaacacactattcaatagtatatcatgaagacgtgacgttgcccttgcgcaggtgccgtaagactccgcggacaaagcaatgaggcttcccccgcgagaagggaagcctcatattccattcattctattcagcgatgatgacgcctaatcaccgatcatcctttgggaacagcgcatcgaaggcatgttccatcacggacttacggcggatcacaccgacgagtctgccatcaccatccaccaccggcagtttcttgaactgcttcttggcgaggattcgggccacctctccaacatgctggtcgggagtggcggcaacgaccttacgcgtggcgatgtccatcacctttttgccggagagcgcctgcaccttggaggccacggtttcgtcgtcgaacaccaccatcgtcgaaccggtgccggtggaaaccgtacgggattcataggtggcaatcgatttcaggacatcgccgtcgctgacgaagccgacgagcctgccatcgccgttcaccacgggaaggctggagacgttgaggcggatgaactcgcgcaccacatgcgtgatgtcatcgctgtccaggcagctgtagggctgatcgtccatgatctcgccgatggactgttcctgggcctgcttgaacagggaggcggcgggggccacgtatgcgccggcgtagtgatgctcggcgggctggccttcagtggtttcggccgcgacttcggcggaggcttgcgcctcggaggccttggcgttgcgtgcggcctcctccttggcacggctggtgacggtgaagatgcagatgatcagggcgatcagcgagatggcggcgcacagcaggtaggagaacgcgatgccgctggccgtggcggacttcacaccttgggacatgcgcgaggcggtcacggatgtttctgcggtgaccagaagcgaggtcgcaatggctgccgcgatctggcggccggtgttggcgatggcgttgccatgggcgatcatgtcgttcggcaaagcgttgacgccccaagtgtttatcggcatgttggcgatagcctgaccggatgcctgcaatgcgcagaacacggcgacaaacagcactgatgtcctggtgttgatggtgccgagaagaccaagagagatggtcatgagcgcaaggccgccgatacccacgcctcgcgggccgaatttgtcgaatgcggcaccggcgaccggactcaggatgatgccgatcgccgcggcgggcagcatgaccatgccggtgacggtggcggattggccgagcacattctggatgaagataggcaacgtcacgttggttgcggcgactgcggcgttgatcagagtgaccagaatcgcggagttgcggaagttgcgggtggcaagggtgtcaacgcgcaacaatggctcatcgagcttgacttgcttgtatacgaatgcgacgaaggccacaagaccaacgacgattgaggtaatgacgaccggactggtccatcccatcgtggaagcggacgagaagccatagagcaggccaccgaacgcgatggtcgaaaggatcacggacaggatgttgagctttgggttcttcaactcgctgacgttcttgagcatcatcgtgcctccgacaaggatgaccagtgccacgactgcgatgccaatgaacatcgggcgccatccgaaactgtcaatcaccagaccaccgacaaccgggccgatagccgggccggcggccatgacgataccggccatgcccatggcggtgccgcgcttatccggcggatagacgagcatcggcactacggcgaccaatggcaacagcacgccggagccggcggattgcagtatgcgcccgacgagcaacagcatgaaattcggcgcgacggcacacagcagtgtgccgaccatgaaagcggcaagagctccggcgaagagctttcgggtggagaatttatcaatcagatagcctgaaatcggcaccatgatgcccgagaccagcatgtagacgctggtcacccactgcacggtgccggtggtgatattgaaatcacgcatcagtgccggcaaggccggtgacatgacggtctggttgagcagcgcgatgaacgagccgacgacgatcacacccacaacgatgaatcgggtgtgcgaatcaataggctttacggaactggtggcggacccgagttccgcggttttctgtgaggtcacagcatttccttctgttggtaacgtcatgcgtggcgatccggccccatgcttgtgtcaagacacgaggacaccgatgagtccggacgtaaaggaaaagccgccatccgttccgcattcatatacggcaaacgattcgcggctttgcgtaagttgatggctatggtgagcgattcatgcgacgtcgactgcggatgggccatcggtacatcccggcataaggcgtgtccccgctacaccagcatcgagaatagggccatttgtggattggcaaacagaacattgccgacgaacgacccacggcaggcgcgtgcgatgaacatcgcgtagcgatacaggttcatggcatctccttgatggggtcttcgtacggcagacatcgagaagcctatcatcattcaaatcgacggtgaaacccacgcatgcctgacaatacacaaaatcttcacaaaaggattgggcttaccgcatacgctccgcctgaataatgctcatgtacggtaaggaagcaagcaaccgaaaacaagagatagaccgccagcactacactattccgaaccaaagaccaaaagataagcattgtgggaaaatctaaacttttggattttcctacaatgccaactacggcggaatccctcccactccttatatctttctgtatacattgaatttgtatttagtaaaatgcagacaacaccacggatcggcttttggttggacaattccaaccaaacaccacagcagacagcagaaaacattctgaacgctaggaagccggtatgattgttacatataaggggaagaaaaatttcttttaggtacttgctttcctaaaactgatgtgatacaatgatttaatccagaaaaggagtaaaaaatatgcggcaagatattcttaaataaaactataatcaaatagtgggaacaaaggattatgatagctccttttgtaggggcttagttttttgtacccaatttaagaatacttttgccttatcaattttgacatatccccaaaaacagcaatcacaaacaggtgtatgctgtatatgtgtatgtccgcaacttataatccccagtggtaaaagtattttactgctggggatttttatgccctttggggctgtaaagggaggacaatcacatgaaaataatcaatattggaattcttgcccatgtagacgctggaaagacgaccttgacggagagcctgctatatgccagcggagccatttcagaaccggggagcgtcgaaaaagggacaacgaggacggacaccatgtttttggagcggcagcgtgggattaccattcaagcggcagtcacttccttccagtggcacagatgtaaagttaacattgtggatacgcccggccacatggattttttggcggaggtgtaccgctctttggctgttttagatggggccatcttggtgatctccgctaaagatggcgtgcaggcccagacccgtattctgttccatgccctgcggaaaatgaacattcccaccgttatctttatcaacaagatcgaccaggctggcgttgatttgcagagcgtggttcagtctgttcgggataagctctccgccgatattatcatcaagcagacggtgtcgctgtccccggaaatagtcctggaggaaaataccgacatagaagcatgggatgcggtcatcgaaaataacgatgaattattggaaaagtatatcgcaggagaaccaatcagccgggaaaaacttgcgcgggaggaacagcagcgggttcaagacgcctccctgttcccagtctatcatggcagcgccaaaaatggccttggcattcaaccgttgatggatgcggtgacagggctgttccaaccgattggggaacaggagggcgccgccctatgcggcagcgttttcaaggttgagtacaccgattgcggccagcggcgtgtctatctacggttatacagcggaacgctgcgcctgcgggatacggtggccctggccgggagagaaaagctgaaaatcacagagatgcgtattccatccaaaggggaaattgttcggacagacaccgcttatcagggtgaaattgttatccttcccagcgacagcgtgaggttaaacgatgtattaggggaccaaacccggctccctcgtaaaaggtggcgcgaggaccccctccccatgctgcggacggcgattgcgccgaaaacggcagcgcaaagagaacggctgctggacgctcttacgcaacttgcggatactgacccgcttttgcgttgcgaagtggattccatcacccatgagatcattctttcttttttgggccgggtgcagttggaggttgtttccgctttgctgtcggaaaaatacaagcttgaaacagtggtaaaggaaccctccgtcatttatatggagcggccgctcaaagcagccagccacaccatccatatcgaggtgccgcccaacccgttttgggcatccataggactgtctgttacaccactctcgcttggctccggtgtacaatacgagagccgggtttcgctgggatacttgaaccagagttttcaaaacgctgtcagggatggtatccgttacgggctggagcagggcttgttcggctggaacgtaacggactgtaagatttgctttgaatacgggctttattacagtccggtcagcacgccggcggacttccgctcattggccccgattgtattggaacaggcattgaaggaatcggggacgcagctgctggaaccttatctctccttcatcctctatgcgccccaggaatacctttccagggcttatcatgatgcaccgaaatactgtgccaccatcgaaacggcccaggtaaaaaaggatgaagttgtctttactggcgagattcccgcccgctgtatacaggcataccgtactgatctggccttttacaccaacgggcggagcgtatgccttacacagctgaaaggatatcaggccgctgtcggtcagccggtcatccagccccgccgtccaaacagccgcctggacaaggtgcgccatatgtttcagaaggtaatgtaaagatacataatcgtcaagacggcaacaatcagaagttatggagggtaacaatggaatatagtaaggaagatttaatggaagcaaaaaagcaacggtccggggatgaatcaggggcgagctaagggttgcatctcgtgtttccgtcatgatttctggcgaagactcataatagaacacacattatactgccgcagcagccagtccttgcagaacaatgtcatgacaaaggcctgagaagacgacttctcaggccttatccgtaccgctcccccagtcgcttgtagcgacagctcccctcgaagaggggagccagagaaacacttacttggagacgttgaacttgaactcggcgtcttaccggtcttcttcgtcccgccttgccgcggatattcaatcgcatcgcaggggtgacttcctcgatcatttgacagaccgaccgacggtctgtatgcttgacggggacatgaacgaaaggcaggccatccgcatggcgcacgatatacattccggagacaccgaacgacgaatcctcgattccgcccgcaggctcttcgctgaaaagggctacgagaagacgtctatccaggacatcctgaacgacctgggactgtccaagggcgggctctaccaccacttcaaatcgaaggaggcgattctcgaccggctgaacgccgacgagtgggccgtaaccgcgcgtcttctcgacaaactcatcgagcgcaaggacatgagtgcgcttgagaagctgcgcgcgctcatcgtttccgctgtggacgcccccgatcatctggacctggtccgttcccagctggcgctgctcaaggatcctgcgttctttacggcgaacatgcgcttctggtcgacgagactgccggagtccttccgctcgctcatcgatatgggcgtgcaggacggctccattcccacggcataccccgaggaggcggcgcaactgctctcgctcctcggcaactactggctcatgccctgcttctaccccgccgatcatgccggcatgggacaccgcatccgctgcctcgccacgatgctcgacgccatcggcgcgccagtgttcgacgagacgctcatcctgcggacgaccgaagggctcacggccctgacgccggaagaggatacggcgtccgcataggagacgcgcccgggcgcgccgcatcttgcacatcctgatgccacagatgtcgaagcgcttccgtgcccttttccttgggcgtattgttatcaccataacagaccgacggtcggtttgtataaatggccgtggccaatcacaagaaaggaatccacgatgacgaacgcatacgaatgcacgacccaaccacaaagaagccaagccgctgatcctcttcgcacacgcgacttccgcctgctcgtcgcgggtctcggaatatcgctcttcgccaaccttatgctgcggtttgccatgtccatgtgggtgcttgacaagaccggctcggcggcggcgttcgcctccattcttactgcgagcatcctgcccacgattctgctctcgccccttggcggcgtgatggcggatcgtacgaaccgtcggaccgtcatggtggcgcttgacgcgctttccgccgtgacggtgctcgtctgcgtggcgatcttttcggccgccggtttcaatctggcggcgatagccgtgatgcaggtggtgctcgccgtgcttgacgcgatggagacgcctacggtgcaggcggcgctgccgcagatgttccgctcccatggcgaggatgtgatgcgtcgcgcgatggccgtggtgaacgtagtgaaccagacgagcacgctcgttcccgccgtgctcggcggcgtgctgtacgcggcggttggtgcgatgcccatgatgggcctcacgatcgtggggttcggtgcggccgccgtcgtggagtgtttcatccggctcggcgctcccgaccgcggcgacgctggccgcgtcaccgcggtcgacgacctgcgcgcggccggacgtttcctcacccgcgaacatcctcatgtgctgcatctggtgttgatctgcgccgcgctcaacttcctggtgacggggtatgcggaggtcggcttcccttacatggtgcggaccgtactggggttcggctccacggcgtacggccttgcatatggtctcgtgggagcatccggactgctcggcgcgctcgccggtgggcgggtcgcgaggtcgctgtccatgcggcgattcccgatggcgatcgccgccttctcgctcaccatcctgccccaagcgctcgccatgacgattcccgcaggtggagtgatacgactcacggtgctcacggcgagcacctgcggaaccatgatcgccatcaccctcacgaacctcatcgccgtgccggcgattcagatgagctgccccgagaacatgaccggcaaggtgatgtcgcttgcgctctccgcgagcatgtgcgcccagcccctcggacagatcgcatacggctgggcgtacagcgtctacccggcgggcgcggtcctggcggtgacgttcgccctggccaccgcgatgctgctgccagtcgcgcacgtaacgcggcggctctaggacgggattccatcaccttcgctctggacagctgagacatcaaagtcatgtgtggatatgcaaacggccaccatcaatcatggtgatgttggccgttcacgtcatccccgtaccgtagatatgaaaatgaccactgtaatcgcacatacgacgatggtggtcattggatcaagcgccccggcgtccggcctccacgagcgggcggatgtcgtccaaggtgctggggtcgaaggtcagcagatcgtagtcggtctgagggttcgcccagaagtcgggcgtggtgtcgagcgccttgccgagccgccatgccatggggtggtgatgcgctgcctgccgttgacgatgtcgccgatcggcgacatcggcgtgctttgccatacccgtcgaggctggtgtggacctgccagacgtcccagatatggtatgcgccgataagtccgaagcaatcggactttgattcggattcggaaacggccttcataccgcacttgtccatcacacaaccggactggaacatgaactcgacgatgtcggcatacgacaccaggctgaaaccagttcgccgggggcggcgtattcgtatgagtgcccatacaagtacgtgggcgagatatcgatgtcgccgtataggattcaagtcaatagcagccttccacgcctcctcacacgcaacccggaaggtcctttttattggcgaactcgaccggtttggtctatcgcaacagtcgttcgttgaggatgacaggagcgtgttcgattgacggctgcaacgcatcgagctggtcggacagcttcgactcgtcgaccaccggcagttcgagcagggatcgtgcggccgcgtgcaggtagtcgttcaacgcctcgatgcggcccggctccagcgggtaagccgggtcgttctccaaggtgacgtccaacgttttgcgcaacatctcatgctgcgcgctgcccatgatggccgcgcactggtcgcggaacgtcatacgagaatttgccggctgacgttcggacagtacctgcggaatccacgcgccgccctcccagtcggcgcgcatgtcgttcttgaacagcgacatgttatggtcgaacaacggcgccggacccagaatccggccggtacggttgtcgcgcaggaacccgtggttgttagcgtgacggtcctgattgacgatgagcgcgtcgaacactagcatcgtgcgcatcgcctcgaacgattcctcggacacggcgcgtgcggcggcgaggatctccgggaacgacgccagctgcgtcgccacatagaacggcacgaacgacacgtccttcgagttcatcgaaccgcacaccgacgcgagcttgcccttccaacgggcgatgcggtagtcgaccgcgttcacaccgagcctgcgcgccagctgcgaggcgagatactcggaatacggttccaaaccggcgttcgcatacccttcggaacccgccttccacagttccagcccacgtcccgtatgccgccacgccttcggaaactggccgtccgtcgtccactcgctcgacaggccgatcgcatgcttctcgctcgacgtataccccgtgtaggccacgatggcgagcgtctcgtccaacggattgtcatacaggttgatgtccgcgaacttgaggttctcaccgtcgcgttccacccagaacgaatcgttgaccgacagccccttgcacaggtcgatgatgcccagcgtatccgcaatgttcaaccccgcctgcgcgagaacctgcgtggcgaactcacgattcttcggaatcgtgcgccgctccagccacgtcgtcagcttcgcattatccggctccggagccaacggaaacggcagcaacgcgcgcttcaactcatcgaaccagcggacatgcgcctcgatcttgcccgccagcaggccctcgccatacgacgcatcgaaccggagcagcggatcatcatagagccgcagcacgtaactcgtcatatccgtcccctccaatcaagcccgctccaaagtcatatcgggcgattcacatatgaagaacaactgtctacagtatagacaagggccttggaacgcgggggcttcactctgaagtcaagtatttgatacaatttggtgcaaaaagatagtaaatagcaataaggagtggctatgagcatgcagattgccacgcgagttgatgacgagcaggctgcgttgtttaaggagacgacccgacagctgggtaccaccccggccgatgccctgcgtatgttcatcagcgcgttcaatgattaccgtgggttcccctatgaggtgcgtttgccacgaaatgacgtggagccgtttgcgtccgagcgggacgctactgagtatgccagtcgtctcgccttgaggatgtccgatgaaacgaggtgagatttggacgttgcaggccgatggctacgccagcaagccacggccggttgtcatcgtgcagagcgatgccgtcgatcggttcgattccgtcatcacttgtctgctgacctcatacgattcctccgacatcgacacgcgggtccgattggaaccaagtccggagaacggcctgaacaaagtgagttacgtgatgacggacaagatcgtcaccgtcgaccgcaaactgctgggataccaagtcggcgtggttgatgatgcagccatggcgaatatcggccgtcagctcatgcgggttctaggtttgctgtgacgtttgggatggctggcgggcgtgcgtctacttgtgacatcgtttatgcacccttgaggccgtatgatgatggcgtcgaattcaagctctccccaacgtctaagaaatggcttccttcatattacggtcatacgaccaacaccatatgaaggaagccatcatgaatggtctaacggcaatcagcttctcatacgtgattgccagtcattcaccgaatcagccgcggttgtcgaacatctgcagcagcatcttgctgggttcgacggcatagacggtgtgcggcagacgggcgctcaggtagacgatgccgccggccgtaagctcgacttcacggccttcgccgccgacgcgcagcttgccttccagcacctggatgatcacgggcatggccgcggtgtgctcgctcagtgcctggtccttgtcgaagccgaacagcacggcgcgcaggccgtcctcgcgcagcaccgtacgggagacagtggcctcctcctgaatatcgatcaacgaggccaagtcttcgatgaatccaagatgcggctcggtcgaaatggcgtggccttcggcgtcgtgggcgtcgtgcttgcaggcgcagtgcttggcctcacccgcttcagcggccgcgacttcgccatgcttgcagtggcactccttcttcgcgcccggctccgcggccgcgccctcggcgtgctcgtgcttgcaggcgcagtggtgttcgccgttggcggcagccgcctcggctgccgcggcggctttcctacgctgcttgcacttgcaatgctgctcgtcgcgtcctgccttgcatgcggtctgctgctcgttctcatcggccatgatgttctcctattcgtcgcgcgtacctcacatacgcgtcatcgcttttacttgtttcccattatccggccatcgttgggccggcacaccgctgttacgcttcgggcttgcgcacctcatccttgacggattcgtccaggttgtccggctgcaggccgagttcgtgaatcgagtaggtgccgccggcgcgcagtagtcggaaggccccgccgataatcgcctgcttgccacgctcggtctgcatggtaagcatggcttcgccgatcaccacgtcggcgctgttggattccagaccggtgtcggcggcgtcgcgctgcacgcagcttgccggaatcgtggccttctcactggtgagtttggagatgatgtccacgacctgctggtcgcggtccacgccacggtagctcttggggtcgcggtcggactgcggcaggggcagctcgcggttggcggcgggtttggtggcggtggactgagatgcctgagaaggctgcgatgtagtggtcatgtgtcgtgatgctatagtccacagcccgcccgcacaagggttttcgctagaaatcagccgaatgtgagaatgctcacccgagtaggcgcctgagcatgcggctcagggacgattcaggggatgctcaggggtcccgtcaccgattccccacatatcgcccgcgttcgcctaatagaatggaatccagcattcgattcggtatccggcgcaatgccggcaaacgtgaggaacttacgatgagggtcatcggcaatattctgtggatcattctgggcggactggcaatcgccatcagctggacactgatcggactgtttctgtgcatcaccattatcggtattccactaggagttcaggcgttcaaaatggcgggccttaccttgacgccgttcggcaaaaccgtgcaatacggtggcggcgttggctccacgctggccaatatcctctgggtggtgctggtcggctggtggatggcactcggctatctgggtgcaggcgtgctcaactgcatcaccatcatcggcattccgttcggcatccagtcgttcaaaatggccaagcttgcgctctggccgttcggcgcacagatctacagtctgtaacaattgtttctgcagtaggtccggtgcagcgcattatcatcgtgtgttgcaccggactttttatatacaacgggcatttcacacaccgcgtgatttgacggattcggacgtaagactttatggtgcgcgaaccatgatcaacacatcgcattcagcagcaacggcgtgaacgaacacgccatctgatcagtacacctctcattgacgcatagctgaatcattgccggtgatatcgagccgactcgttcgcaccatgccccataaacgtacctatacgagtatgcgttcttggcatcgtcgcaacgcaatgcaccgcggcaaaacccattgcataccatcacatattcagaaagaacaacagatcatgaagtatttcactactgacacgcatttcgggcactaccatatgtcactcacatgcagtcatgcgcacaactatatttttgtattatccatgattttatagttgtttattgactcatttccttctctatcttatactttctacaatcaaggatgctctttgggaagcgagtctctctcatggatatgaagtatagaagtttggcaaggctgttccatgccgacaggtcagtcgattccttcaataaccatgcagcactcgcacggcagcggcttgaggcagattccacattcaggaccggggtcatcacgccattgggcgagctgttctccgccacgccacgcgagacgaccctgctcacggaaaatatacttctcgccgaaaggcgcatatcacggctatggaacctgattcccggcgtcatgcactgggactacatacggcattccatcagtgaggaactgttcgccaccaacgagatggaaggcgtgcgcagcacccgcaaggaaacccaggacgccgtggacgcggccgacaaggcaaggagggacggcgacgactccaaggcgcggttcagcgaatttgccaagctgtacctgaacctcacggacaaggactccgcgttgccggcgggcatcgccgccatccgcgacatctatgacaaggtcgtgctcgacgaaatcgatgagagcgatcagccggacggcgacctgttccggaaaggcgatgtggaaacacagtggccgcacggcctcgcgatccataacggagtcaaaggcgaaggcaacatcggcgcactcctcaccgatatgatccatctcgcgacctccgacgagattccccggctgcagtcggccatcatgtcgcacttcctgttcgaatacgtccacccgttctacgacggcaacggcagaaccggccggtatctcctggccctgtacctgaaccatgacctgactatgcccaccgtgctatccctgtcccgcaccatcgcggagaacaagaacgcctactacaaagcattcatggaagcggaggacaagctgaactgcggcgaactcacgctcttcgtgaacaccatcctcggattcatccaacaagcccaggatgagctgattgacgaactcggtatcaaggtcgatcagctcgacaaaggtcggatactctgtacacagcttgaaaagaggcatgccctatcgcgcaatgccgtctcggtgctctatggcgtgattcaggaagaactgttcgactcgtccaaatccatgtcgttggacgaagtggcccatcacatcggactatccaaacagagcgcaaggaaatacgtggaagagctcttggccgcggggctggtcgtacagaccggaaaacgtccgctgaaaatacaggtggcgaaatcattgaggaatgttctcgccacaggagccgacgagaacgcggaagcctaagaaaagtagacgcaaacatctcatctcaacgaggttcataaaggttcgtaacatgaagaaaggtctgggcaaccaacactgctcggacctttccgcaacactcccgtcagtcgctttccgcgacggctcccctcaggaaggggagccgaggaaaactacttggacacgttgaatttgaactccacaatatctccgtcggccatgacgtagtcgcggccttcctgacggagcttgccttcctccttgatcttggccatggagccgtcggcggccacgaaatcgtcgtaggagacgatgtcggccttgatgaagcccttttcgaagtcggtgtgaatcacgccggcggcctgcggggcggtccaacccttgtggatctgccaggcgcgcacttccttgacgcctgcggtcaggaaggtctgcaggccgaggatgtcgaagcccacgcgggccagctggtcgagaccggactcgctcaagccagcgtcggccagcatttcgcgggcatccgcctcgtcgagctcggtcaggtccgcctcgaactgagcgttgaggaacacggccggagccggggccacggatgcggcgagcttagcctgcaggtccttgttggccagctcgttgtcgtccacgttgaacacgtagatgaacggcttggcggtcatcagatgcaggtcgtagacggaatccttgtcgaagcggccttcgcgtgcggccttgtcgagcgtctcgccggcttcaaggatggtctttgcctgcttgactgcgtccatgtaggccggctcgatcttcttgcccctcagatccttctccagcttgggcagcgcgttttcgatggtctgcaggtcggcgaggatcagctcggtgttgatggtgtcgatgtcgtcggccggatccaccttgccgttgacgtggacgatgtcgtcgtcctcgaaggcgcgcacgacctcgcagatcgcgtccgcctcgcggatgttggccaggaacttgttgcccaggccttcgccttcggaggcgcccttgacgatgccggcgatgtccacgaaggtgacggtggccggcacgatcttttcggtatgcacgagcttggcaagcactggcagacggtcgtctggcagcggcacgatgccggtgttcggctcgatggtggcgaacggatagttctccgccagcacgttgttgcgggtcagtgcgttgaacatggtggacttgccgacgttgggcagtccgacgattccgatagtaagagacatgattccctagcttagtattaggcttcgatggcgtcgacggccttgatgaccgcaccgcggaacgcgctttcctccagcgaggtcacacccttgattgtggtgccgcccggcgagcagacggcgtccttcatgacgcccggatgggtttcgtttttgaggtatagcgcaccgacgccttccaccatcttcgcggctagacggtaggcggtggcacgttgcaggccgtatttcacgcccgcgtcgccgagcgcctcgatatacatgtcggtgaatgccggtgcgcagcctgcgatgcacatgccaatgcccatatgcgcggaatcaacgcgttcgatgaggctgatcgatgagaacagccgctcgaacacttcggcttgcgtgtcggtcagcgtgttgtcggcttcggtgacgagtacccccttgccgacggccatcggcgtgttcggaatggtgcattggatatgcgccgcgttgaaatcggcgccgaacaagtctcggtatttgtcaagatcccagcccgccgcgatggatacgacgaatttgtcttcgtcggcaatcgcgccgatgactggcttgatgacactttcgattcggtacggtttgatggcgatgacgaccatgtcggacgctgcaacgacttcggccgcgttgtgcaatggctttgcacccactttcatcgtggtcttttccagcttgtcgtaatgcgcggcgcaagccacgatgtcggcaccgtcgacggcgccggctgcgacgagtccttcggcgatggcctgcgccatattgccgtatccgatgaatccgatggttggattggacatggtgtcctccttgtcgtcttttctaatggacgtaattgttttggatgcgatggtttcggagaatttcgggaatgtcagaacagttcttccaggtctcccctgttcaacgcctcgtcgaacaggtgcttgaacaccacggaaccatgtacgccgtcgtgctcgaattcgttggtggtccaatagtgcgatcgtcccacacgggacagcgtatcgaattgcagaccggagtcgacatacatgtcgtcaaaatagacggcagcctgcagcggaacctcattgcgcgccaactggtcggcatcgtagatcgtgccgaaatgcgtgtcttccataagcacgtccatggctggtttgaacggacgcaacgcacgttcctgctcgaacatccacgggaacatggcctcgccggtgaaattaagcggacgaatgtcacccgcgaattccggatactcgccacgcacgcgctgggcggcccagcaaatcggcgtttccagctcaccattggcgtagatgaactcctgcaacggccaatacagcgggcgagatgaagtcgcattcatcacggaagacaggaattcgtcagacagttccgccgaggtcgaggccgaaccgtcgccgtcaaggaatgcctggtcaagaatccaatgcacgcgttcgaaactcggcttcataccgaaatcggatcccaagcattggaaacgttccaccgtgagcggatcgccgtccggcaatgcgaccttacgcgactgcagaacgtcggcaacggccgcggcacgttcgatatcgatcgggtaacgctcgtagaactgcttcgtctttgccaccatgcgtgggaacgtatgacggtacacgtcggtcgcatcggcgggaacatgcggaatgccacccgtggtgaaactggcgataactccttgcggaaacagcgaaagatacgtcagcgtcaggaatccgccatagctttggccaagcgtgacccaacgtgcgcccccgaattcggtacgacgcagatgctcgaaatcacgaacgatcgaatcggcgaggaaacgcttcaaaaacgcggcacctgccttgccgtcgccatccatgccctcaatcacatgcgtatcgacacgagacgaacgccccgtaccacgttgatccggcaacaccacgcggaaatgcttgatagcctcctcgatccaaccatcggaacttgggccgagcggacgcggaccggaaccgccgggaccaccctgcaggaacacgagcagcggcaggtcgtcatgcacatgttcgggagaggtgaccacacggtagaacaggctgatcgattcgccatcgaacccatgaccaggctcgtggcccgtccaatccaacggcaccttgatggaacgatcctcaatatgcaatccgggcacgtagtattcgctcagcaacgtcatgcattcacctttcccttggcatcatcggcatgttcaatgcgggtagtgactttttgatggcttccatcccacccacatgcggagacaaccttacctcacaaaagcggctttatcttaccgctatttcattcctgcgcatgatggcgtcacagcatatctggcgctagggtggaacgtatgtcgaatctcaagcagcgtctcttgtcatggatgcatggccatgttttcgcaggcgatctcatcatcacgcttgttataggtgttctgctgttcggcgtgaccggcggcatcacctataatccgggattgctgtttgaccttaagccttccacgcagatgacatgggaagcggcaatgcttattccgctgctaatccgtcgatggtggccacagaccggagcgttgctctgcgtggcattgaccttggcgcatctcatattcggcccttgcctgttgggtgccgatattctggcattgttcatgctgtattcagtgatcgtctacggcaatcccaaaaacacgaaagccttcattattctggcgttgaccatcggtcttctggcttcggcgctggcggcatggaccatgaccaatggaccactgctcaccggaggcaaagtgcatacatggagcagctggaatgactcaaatccaaatggcgttatggtcacggaagacactctcggttccatctacacaggaacatccatatcggaagtcgccgacatggtggcgccttccatgctggtgctgacgccgattttcgaagtatgtatcatttccaccgtcattgtagcgttctggcagcgtgcccgtctggcaaccattcgcatgatgcgggaacgcaatgaggcaatcgccgcgcgagaccaggatgaacgcgatatcgccgcgttggcggaacgcgcacgcatcgcacgtgacatgcacgatgtggtggcgcacaccctgtcaatcatcatcgtgcagtctgatggtggtcgctatgcaggcacgcatgatcccgcggtggccagaaacaccatggagacgattcgacacgaatcggaacgcgcactgcatgacatgcaacgtcttctgggagtattcgggggttcaccgcacgccgattataacgatatcggcaatcttgtggaacaagcgcaaaacgtctcccccgacattcgaatccgacggaatatcaccggcaccgccagcccggaacaactcggcgaacaagcctcgatagcttcctaccatgtagtgcaggaggcactgacgaatatccgcaagtatgcggggccgcacgtcgatgtgcacattaaagagtcatggaacaacggtttgctcactttgaccatcaccgacaatggtcatggcgcggcggccaatatcgacgggcatacgccaggttacggcctgctgggcatgaaagaacgcatcgaatcggccggaggctcgttgcaggctggccctcaactcggcggaggcttcgaagtcatggccaccctgccttacggcggtaaagaacaggtgacagaagaaaccggcgaacagtatgcctcggaacagtccgaatcgtgcaacacaactgccatatccagcaaagcgaaactatccgacgaagcaatcgcacctcacacagtcgtcaacatatcggcgcgaatcccagatcagccatcggagcaaacgaaggaaaccaaccaaccgaccggtcgcgatcatcgttcgaatgccctgcaacatttgcgcatcaccgcacccaatctgcatgatttgctcaaatcattgaaactgaaatccgtagaacttgcaaatacatccaattcgcgagggctgaattgggtggaacgtgtttccgcgtggacgcagcgccattatgcgctcatggattccgttggtgccgtggcattggtcatgctgctgaatcgcatgtcggttacgttcttttttgatagttcacctcatgcgcagctctcaaatgcgatcgccgcatgctgcttgctggcgctggctcttcgacgcaggttccccgagacttgcgcgcttattgtgttcgtattgtcagttgtgcaattggtgtttttgggatcgattgaggttggacatatcgtagcgtcgctgtgtgcgctgtattcagccgtattgtatgggcgtgaacacgcatggcgttggaccggtcttgccgccgctacctgttcggtgctgatgggcttgaaaatcgcggctgatcaacacggatacactaccttgttcggcgccatcgccgcttttgcaggcttgacgaaaccggtttcagtcacgtcaagtactacggcggcgttctttaccggcgttatgtatacggttgcagtgctgatgctgtgcgccggcattatggcgtgggcacgttgggctcgttccagtgattcaaacgcactggtgttgcaggcgcgagaggaagcgctggtggccgagcaggagaagcagcgtattctcgcggcgaatatggaacgtgaccgtatcagtgccagcattcaggctgaagtcaccgccacgttgaacagcgtgattagtcaagccgtcgatggtatccgcatgctggatagcgccgaagcacaaggcaaagagcctaccgccgacgagatttccacagcgttcaaagccattggcgaacaggggcgcgccgcgcttaaacgtatgcgcgaactgcttggcgtgcttcgtgagactggtttcagcgatgacgctcatgccggtagcgcgaacgaactgcagttgaggcccgcagcaccgttggaggagcagctgcagcgcgcatctcaatagccgattcaagttttcagggagatttaagggtttgtttcgcgctgtgagcggaacaatgccgataaggtggagagtatgagtgaagaacagaagattcgtgtggtcattgccgatgatcaggaattggtacgtgccggtttcgccatggtgatcgggtcccaacctgatatggcggttgcggcgcaggctcgcgatggtgcagaggctgtggcgttggcggaaacactgcatcctgacgtggtgttgatggatgtgcgtatgcccggcatggatggtattgaggcgactcggcagatcagttcgttgcagcatcgctttgctgccgatggaacgcaatcagaagtcgcccgtaccaaagtgatcattctgacgacattcgatttggatgaatatgttatggctgcgatcactgccggagcttccggttttctgctgaaagatacggaaccggaaacgttgttgaattcgattcgcacggtttttcaaggtaatgcgattatcgcaccgtccgccacgaaacgtcttatcgagaaaatgatggaaggcgatttcatggctgcgaatgttggcgcacatggaaattccactgcttcttccacttctgattcgacgtacaccgatccggaattagatgaactgaccgatcgcgagcgcgaagtgcttattgagatcgcgcatggattgtcgaatcaggagattgccgacaagcttttcatcagcctgccgacggtgaaaacgcatgtggcgcatattctggcgaaaatcaatgcacgtgaccgtgtgcaggcggtggtgttcgcttacgaaaaccatttggtctgattgatttgttgttttgcgtatgcatgatacgcgaaaaggactcctgccatgtttgtggcaggagtccttttcgttgtgtttgctatgaagcttaggcttcggcgagcgcctcaacaggaggcgtgctcactgccctgcgtgcggggaatacgctggcgagcaatgctgccacggctgccacggcgagtacgatgccgttaatgccccattcgaacgggaacaccactttgccgtacatactgaacaccacgtatgcgcccagccagccgaacagggtgccaagtagtacgcccgcgatgccggataccagcgagatgagcagggcttccaccgcgagggagcgtcgcagctggcctcgggtcatgccgatggcgcgcaatgtggcggattctcgggtgcgttcgatcactgacagcgacagcgtgttggccacgccgacaagtgcgatgagcacggccacggcgatcaaccccaccagaagcatcatcatggagtcgatcatgttcgcccatacgatgcgttcggcgatcggtccggtcactgtcgcatcagcgctcttctccaatgcggcctgcatgtcgttgtagatgccgtcaacggaaactcctgacttgtcagtatctgccttgaccagcaacacatgggtggcggcatcgaggtcaccattggtgaaatggctttcatccacgaatccgacagctccatactgtgcggatacgcgacggtagtcagcttggtttgcttgcaatgtcagcgaacgcgtagtgacgccgccctgattccattcggtggagaaatcagccgtgccattggcgaactgcagttccttgccggtttgcgcattgtatgttggcatgagcacgctatcactgtcgatggaggcgttacccaagttggcacgcatgacctgcttgacctgatcgatgttcttcacaccgaccagcaatgcggacgtaggctgggttccatccgctttctccaaggtcacggaaaccgccggcgcatacaatgtgtcggacacgccgttgatgtcggctacatccttggccatttgctggctgatgtcatcgcccatggccacgatgtcgacgctataacgggtggcgagcgcaccattcatagtctctttggcgctagcggcaccggttgcgatggtggaaaccagggtgacgccgatgagcagagcggcaccggttgctgcgatgcgtcgcggattcttctgaatgttggcgtgcgcaaccgttgcggaagggcctgtcagcgaggccaacgctccaacgcccttcatgagggccggcatccagaacaccgcggtgactaccatgccgaggaacaccagtgcggcgccggcgatggctacgagcagaatcatcgtgaattgatcactgctcgcatcctcgccgccattggtggcttgtacctgccagatggaaaataccgccatggtgataccgaccaccaccatcagaatgccgattatggctcgtgtgaggccggaacgacggttgtcggtcagttcgatcgggcgcaatgcctccaatggtgtcaccgcagtagcggaacgtgcggatcccaaggatgcgagcaccgtcaccacaataccgaaaagaatgggtacgacggcggcttgccaagagaaattgaatcgcataccctcttgcatgatgtcgctgacgcacatgccccacatgagcaggcttcccagcaccacgccaagcacggatgcgacgaagccaagcactgccgcttcggacagcacggaaccatacagctggccttttttcgcgccgatggtgcgcagcaaggcgagtgtgcggcggcgttgcgccacgagtacttggaacgtgttggcgatcaccagtgccgccacgaacatggcaagcacgccgaagcacataaggaatgtggtggcgatgttggtttggttgccgcttaaggatttgatgctttcgtcactgatttgctgtcgtgacatcagatcgaaatgctttggcagcaacgctttcacaccgttgatggtttttgcggatacgctgtttccatccaaggcaaggtcgagatacaccattgttgttccggtggcgttgaaatcgtccactccctgcattgcggcaagcagattgttggatcctacgatcgcaccaccatagtatgagtaggcgccgttcggatcggatgtgagtcctaccacgcgcacgttgtccgccttggctttgccatcgtcgcctaccgcatatcgggaggtcaggcttacagtgtctccaacgccgacgttcaactgtttcgccatgtcttccggcagcgcgacttcgttggaatccttcggctggtccccttccgtgatattcacggggagcatgttcttctgtgccgcggtggagatgatctcgccgctgatggtgctgtctcccttggaaacgctggcgccggtttccaccgaggcgcggatgccgtcgactccttcgatgccggcgatctggtcgagatggaagtcgccgacagtgctggagtacgcctcgtcgagttcctcatcgctcaggtcggagctgttgacggtcaccgcatagttggcgtttccgaacatggcggtcagccgccgtgtcagggagtcgttcatggcattgccgaacaggaagatgctggcgatgaacgccgtgccgatcatgatggcgatgcctgcgggtatgagcatgcgcttggtttttcgcatgagtttcaaagtgatggaccacatggtgaattctgttcccttcttcgaatgcttctacagtgcgtttagcgggaatgtctcgcggaagccgcattcattgtggcggcttcgcgttccttcatcaacagttcactcatctggtctgctgtcggcttgttcacgtccgccgcgatctggccgtcggcgaacacgagcgcacggtcggcgtaagacgcggcgaccgcatcatgcgtgaccatgacgatggtctgtccgagttcgttgaccgaacgcttcaggaagccgagcacttcggcgctggagacggagtcgaggttgccggtcggctcgtcggcgaacaccagcttcggcttggtaatcagcgcgcgggcgatggccacgcgctgctgctggccaccggacagctcgttcggacgatggttgagccgttgcttgagtcccaaggtttctacgagcagatcgaaccaggcacggtcgggcttatcaccggccaaagtcagcggcatgaggatgttctgctctgcggtgaacatgggcaacaggttgaagctttggaagatgaagccgatcttgtggcgacgtagcaaggtgagctgcttgtcgtccatgcgggtcaggtcggcgccgccgaacaagatatggccggaagtggcggagtcgagaccggcgagcgtgtgcatcagcgtggatttgccggaaccggatgggcccatgatggcggtgaatttgccgcgttcgaaactcacgttcacgccgcgcagggcgtgaaccatattgctgccggtgccgtagttcttgaccaagtcgacggcctgaataacgatgccgcgcgatgcggacgggttctgcacgttcataatgcctctccatattgggccgggccttatgcccggatgatgattccaacttatgaagaaataacggcgcgccccatcgtgcgccagactgaattgggcggtcggccacgcgccggccctcatccttgaggattatgtcgtctcaggtctcacactattcatgcctccgcgcaaacagtgtgaggcatacagacgcaagaaagcccgcactgcatgacgtcagtgcgagctttctattccttgggtcaagcgatcaggcggaaggcaccccatgcggctcgatgattcgtgatgcaccccattagcatcgcgccccttctcatcgggccgtcaaccttcctgtcgacctcacttggccaagccggaagcgcgaagggcctcgaagccgcccttcaggtcatcgaggatgtcctcgatgttctcggtgccgatggacaggcggatggtgccttggtggatgccctgatcctcgagctcctccagggtctcctgggagtgcgtagtggaagccgggtggatgacgagggactttgcgtcggccacattggccagcagagagaacaggtgcagattgtcgatgaagacgcgagccgcatcctttccgcccttgatatcgaaggtgaagatggagcctgctccgttcgggaagtacttctcgtacaggtcgtgatccggacggcccgggatggacgggtgggagacggactcgacttccggcacggtctgcaggtactcgacgaccttcagagcgttctggacgtggcgctcgacgcgcagggacagggtttcggtgccctgcagcagcaggaaggcggcgaatggagacagggtggcgccggtgtcgcgcagcagaatggcgcggacgcgggtcacgaaggcggcaccgccgagagcctcgtagaagttcaggccgtggtaggaggggtccggctcggtcagggtcgggaacttgcccggcacctcggcccagttgaacttgccgccttcgacgatcacaccgccgagggtggtgccgtggccgccgatgaacttggtggcggactcgaccaccacgtcggcgccgtgctccagcgggcggaacaggtacggagtggcgaaggtgttgtccacgatcaccggcaggtgatgcttgtgggcgatttcggagattgcctcgaagtccggcagatcagcgttcgggttgccgaaggtctcgaagtagacgagcttggtgttctcctggatggcgtcctcgaactcctgcgggttctcggcggaaacgaaggtggtggtgatgccgtcacgcggcagggtgtggcgcagcaggttgaaggttccaccgtagatgttcttggcggcgacgatgtggtcaccggactgggtgatattacgcacagcgtattcaacggcagcggcaccggaagcgacggccagaccagcggtaccaccttcaagggcggcgatgcggtcctcgaagacaccctgggtggtgttggtcaaacggccgtagatgttgcccgggtcagcgagaccgaagcgagcctcggcgtggtcgaagttgtggaagacgtagctggtggtggcgtagatcgggactgcacgggagtcggtggccgggtcggcctgctcctggcccacatgcagctgcagggtttcaaaacggtacttcttgttgttctcggccatgggtctttctccttggttgtgctaggtcgcgaggatttttccttgccacccgcctgccgtgttcgggcggttggcgaggtgttggttatgaagttacgacgcttgggccgcgcggcgcaagctgaacgttatcgggcttgcctatagacccttataaacccttggaatcattgggatatgaggcggttacgtcgggcaaaatagtcatcaaaaatctcacgacacgccgagacacttccacgtctcttcgcgacagaaatctaggaaatcatcctcaatttcctgaaatcctgtcactgaggtgacgtcagcgacagaatttcaggacgaatgggatgatttccgaaatttctgtcgctcagatggaaccagcaacggaattttggggtggatggttttatttccaagatttctgtcgctaggagtttgagcgatctgttgaattcggcgacggaacctcaccagatgaataccggttagcgtgtccgtatccctacagactagtgtcaactgtgattatgtgacatccgtctgattgattggagttttctagtgtccgacgttacgttgtacgaccgcgatccgaagtacatcccgcgcgtggccgccgtgcacgacatgtgcggctacggcaagtgctcgctgaccgccgcgattccgattctctcgtccgccggctgcgatgtgtgcccggtgccgaccgccctgttctcggcgcacacgcgctatgcagtgttcacgttccatgacaccacggatatcctctccggctatctggatgcctggcagaaggaagacgtggagctggatggcgtgtattcaggcttcctcggctcccccgatcaggtggcgatcattcagcgtctctaccgcgaatatccgaacgcgctgcgtctggttgacccggtgatgggagacgccggcgaaatgtaccccacgtacacaccggagctgtgcgaggcaatgggcgcgctggccgatggtgccgacgtgttgatgccgaacctcaccgaagcgagcattctcaccaagcgtgactatcctggccaggatattgatgaggccacggttaacgagctgcttggtgctctgctggagttgggtgccaagaacgtggtgctgaagggcattgaccatggcgatggcaaaatcgtcaactatgtggccagcgcttccaccggtgttgccggcaagatcgagctggctcatgagaagttgccatacatgattcatggcacgggtgacgccttcgcctctgccctgtgcggcgcggtgatggccggccgcggcctggccgagtcggccgaaatcgccggtgagttcgtgcgtcacgccatggtcagcacccgtaaccagccgcatttcgaggatcgtggcgtcagtttcgaactgaaccttggcgaactcaccgatttggtgaagtgaccgcaccttggctcccctctccgctcactgggtctgacgtattcagcgaacaatccgatgggttgttttttcgtcacagggaagtcgactggtgagccttggtaaaccttctgaactaatggtggataaccgagttttcatccacacgttatccacaacacgccaaaccgcgtcatagtatccacatttgccggttgcgcttgtgctcttacataagtaacccgcacagtggaatcatgaacgctttaccacctactcagccgacgacgaagtccggcatcgacgccggtcttgcctttcaccagcccatgctggcttcacctgatccgcaggcaatgctgccttcggaacggattgcggccacgatgggcgaccgcaatctgacgcccaaacagttcggcgcgctcggcgagcagtatgccgccgcgtggctggaggaacacggttggacgaccttgagccgcaattggcatacccgttacggcgaattggacatcgtgatgctcaatcccgagtacacggtggtgttcgtcgaagtgaaatcacgccggtccatgcattacggatatccgcaagaggccattacgccggcgaaacagcacaatctcaggaaagccgcctgcgattggctacttgaccggcgtaatcgggtgccgcattcggcggtccgtttcgatgtcgtcaccatcgtgcttcgggtgggcaggccgctcgtgcatcacattgaaaatgccttctgaagcccccccaaaaaaaaacagccacgttgcgaaacacattgtgaaaggagtagacatggctatcggcagcaccctctcagtcggactgatcggccttaaggccttcatcgtccaagtgcaggctttcatcagccctggcttgccatacttcagcatcatcggattgccggatgcatcgttgtccgaagcccgcgagcgcgtgaaatcagcgtgtcaagccactggattcggttggccgcaaacccgtgtgaccgtgaacatgagccctgcggccatgcccaaacgcggttcgtcgcatgatctggccatcgcggccagcgtcctatgtgcggcgggtgctatagggcatgattgcctagaagataccattgtgctcggcgaagtgaatcttgacggctcggtgctgccgattcatgggctgctcccgatcatgctgcatgccgaggaacgtggcgtgcgcaaaatgattgttccccatcgcaatcttgacgaggcttcgatggtggatggactggatgtagtgggcgtgaggcatgtgggtgagctcatcgaactgatgggcggcgatgccacctatacgattcccgatacaccggttaccgacgagaccaccacggatcaatcgcccacaagtcatcccaacgattgtggcgatatgaacgaggttctgggtcaggagcatgccaaatgggcactgcaagtggcggcggcaggcgggcataatctcatcatgaccggcccgccaggcagcggcaaaaccatgttggcctcacgtatgcccggcatcatgtgcccgttgaacgaggcggaacagctggaggtggcatcgattcgatcgctgtgcggcatactgcctcagtacggcatcaccgacatgccgccgttcgaggcaccgcaccacaccgccagcacggcggccttggtgggtggtggcagcggcatcgccgttcccggcgcaatcacacgcgcgcatcgaggcattctgtttctggacgaggcaccggaattcagcgcacgcgccctgcagacgttgcgcgaaccattggaatccgggtatgtggcgctttcccgttcaaaaggcagcacctactacccggcctcattccaactcatcatggcggccaacccctgtccgtgcggatactattacggcaccggcgaacgttgcgcttgccgggaaaaagaccgtatacgttatttctcgcgattgtccggaccgatactggatcgtgtggatattcagatggcggtgccaccagtctcgcgcattgccgcgcaaagcgagccaatcggcgagtccagtgccgggatacaagctcgtgtgattcgtgcccgtcaagtggccaaagaccggttcagacagtatggatgggtgtgcaacgcgcaagcttcgggcaaatggctgcacgccaatacatcgctgaaagcgatggaattggtcaatcgggccctgtccaatcatcaactcacattgcgcggggctgatcgcgccatgcgtctgtcttggacgctcgccgatctggccggccgcgtatcccccactgaacaggacgtccatcagggcatcgaaatgagaacgaggatgacatgagtaacgctactgatatccggcaatctggcggcaccgcaggaagtgtggatcacaccgatacgagtctcgccgtttcgcgcactattcccgtacctcccacggatacgttgtatcgtgccgcgctcacgttctgtcttgatggcgcggatgtgatgatgtacgccacgctcaaaggcgcggaaaacgccgaatccctctggcatgcgttggcgcaatcccatccaagccagccatctgaaatctgcggcccggcgctgtcacgtattgaccgcatgttcgtggacggcctcactcgatggggccgcaaggcgtcggcgaacgcgatgcgctccttccgcaatgcactggcctgctggcataaccgcatgatggacctgccctcgcaagacatcatccaactggccgactggttcactatggatggcacgcaatggattatcggccctggccatccatgttggccctcgcagttggccgacctgtccattcgctccgattgggcgccaccgctgtgtttgtggatcaaaggcgatccacgcgcattgaccagttgcgccaaaccggtcggcatcgtcggttcacgggacgtgaccgaatatggccggtatgtggcacacaccgtagccgaacaggcagccgctgccgggcatctggtcgtgtccggaggcgcgatgggcacggatgcggcggcacattggggagcgttgaatgcgctgcacggcagaatgcccgccaatgtgggcaaaaccgttgccgtattcgccggcgggctcaaccatatcggaccgatgcgtaaccgcacgctgttcgaacgcatcgaggcgcagggtggtgcactgatcagtgaactgtgccccgggacgattcccgaagcccgtcgttttctgcttcgcaaccgcattatcgcggccatgtcttccacattgattgtgacgcaagcccggttgcgttccggagcgctcaacaccgcgggatgggcatgcgaattgctgcgcgaagtgtatgcggttcccggtgacatcaatcagccttgcaacgccgggtgcaataagatgatcggcgaccaccgagcgatgattctgtgtgccgccacatccaccgaggatatatgccatgaacggcataagcccgttatggcagcatgcccaggcatatcgaaatccacaggtcaggactcgtccgaaaacgaggaggccatggaagtgccggcaacgactccgttatcgccagcatcctcggaatcatcggcgtcacaggagtcgtcacaagattcaggtcattcgaaacgttcgaagaccaagcatactcagcctacgcgcactcaatccaaggatgggccggcgagcgcaactgccgattccggtaacgacaaaagcaagggtgaagagcttccctcgtcgcatcagatgccggatcttcgtgtcaagccgaagcccgatcccgagaaggaagcccaacaacgtatcattatcgccaagctgccggaaatggaacgcacattagtggcattgattcgtgaatgccgtaaacgacatctcatcgtcaccccggacgcactattgcgtgtggcgcgagagacggtacccgacgagattcccaatatcggcaccatacttgagctactcggcgcattggagctgaagggagtgatcgagcgggatgccggcatactcaagctgagcagccgtgtcggctaatcggcttccatgacacggctcgaaggctgttcggcgggtgtgcgagaatcgaacccatgagtccgaaacgtttggaagatatgtatgatgcggtgatcgtcggcgccggagcggccggcctgtcggcggcgttgggactgctgcgctcccccgagatcaccgagctcaaggaacaaggcgtggacccgaagatcctcgtggtctccaaactgcagccgctgcgttcgcacaccggttcagccgagggcggcatcgccgcgagcctgggcaatgtggagtccgatgactggcactggcattactacgacaccatcaagggcggcgactggctggtggaccaggatgcggccaaactgctcgccgaatacgcgccgcagaccgtgatcaacctggagcgtcagggcgtggccttctcccgtaccgaggacgggcatatcgcccagcgccggttcggcggccacacgcgcgagttcggcggcgccccggtcaagcgcgccgcctatgcggccgaccgcatcggccaccagattctgcacgccttgtggcagcagtgcgtggccgccggcgtcgagttcgccgaggaatggtatgtgaccgacctggtgctcgccgacgacggcaagcaggcggccggcatcgtggcctttgacacacattcgggcaagattcaggccatccacgcgcgcaacgtgctgcttgccaccggtggcgcgggccgactgttccacaccacgtcaaattcctgggatctgaccggcgacggcatggccttgaccttggccgccggtctgcagctggaggacatcgaatttgtgcagttccaccccaccgggctcgcgcacaccggcatcctgctgtccgaggcggcccgcgccgagggcggcattctgaggaacgccgacggtgagccgtttatggaacgctacgctccggagcataaggatctggccgcacgagacgtggtctcccgctccatcatggcggagatcgacgccggtcgcggcgtcgccgacccgaaggacccggatggtccgaaggactgcgtctggctggatatgaccggcatcgaccccgaacgtatgaaggaagtgctgccgcaggtggtcgaaaccatcgagcagtacgcgaacctcgatccggccaaggacctagtacccatcaagcccactgcacactacacgatgggcggcatccccatcaccaccgacggcgaggtgtaccgttgggccgacggtgccgtgcaggtagtcgatggactgttcgccgctggcgaatgctcttgtgtctccgtacatggtgcgaatcgtctgggcggcaattctctgctcgacgcctgcctgttcggcacacgcgctggtcagacgatggccgcacgcatcgccgagaacccggttgactcccccatggccgatgattcggccgatgacatgctgaccgatgccgccgatcaggctgccgattctcgcaaagcggagcttgacgaactgctcgccgggccaatagatgattcagacgatggagtgcccaccgccaatccttatcagctcatggcccaactcggatcagtgatggagcaggctctggccgtacgttgcaccgctcagaccatcgatacggcgttgacccagatcaacggtgacatcacaccggttgccgataccttgcgggcccatgacaagaccgccgctttcaatcaggaggtcaccgccatctgggaagtccgtcatctgatcgaactggccgaggtcatgctgcacgcttccgaatcccgtcaggaatctcgcggatccatgcaacgccttgatttccccgaacgcgacgatgagcatttccttgctcactcgatggtcgccgatgatggttcggtaagtttcaagccggtgcacatcaccgactatccgcccaagaagcgcgagtactgatccgctggtggtaatacccaagccgcctagggcttgtggcacaataggttggctaatattggacttgacatcccactgtttcatggaggcagaacatggctgaggcgagcaacacgacggttaccctgcaagtgcatcgtttcacgccgcgacccgagcgtgccgaacgtgcacgcggtggcagcccgtttgccaagaaaggctccccgttcggcggcggctcggattcggcggcgcgccgtcgtccgcgcggcaagcagtgggtgcaggagtacacgattcccgcgcgcccttcggatactgtgttggattgtctgctgaccatcaaacgcaccgtcgacccgacgctggccttccgttattcgtgcggtcatggcatgtgcggttcggacgccgtggccatcaacggcacccccaccctgctgtgcacagccaccatccgcgattgggccaagcaacccggcgccatgcccgaagtcgatgacgaagggttccgacacaccggcaccgaggctgaggaatccgacgattccgcggaaaacgtcgcaaacgcggcggccgcccagaactcagccgcaaacggttcgctgggagtcatcgaactggcgtccctgcccggcttcccgccgcagcgcgacctcatcgccgacatcgaccctatgctcaaccagatcaggaagctcaccccgtatcttcaggcggacggcgtgctcgccaccaccgccgaaggcaaggtggacgtgttcgaatatctgcagaaccccgaacaactcgccaaatacgagctgctgagcaactgcatcgcctgcggcgtgtgcgaaggcgcctgcccggtgtacgccggcggcgacgccttcatcggcccggccgcgctgatttgggcctcccgtttcgtcaacgattcgcgcgacaccaaggccatggagcgtatggatgccatcgacaccgccgacggcgtggccgcctgccagtccgtgcgcgcctgctcccgctactgcccgcgcggcatcgatgtgggcgaggagatgtggcagatcgtggctaaggtccgcgagcgctaagccgcgccgcggctggctgcggagatcgcctaagcacatgcgtcgatgcatccgccgggtgcccgcacgagagaagacatgaaagaacgaattatggacagaacgcagtacaccaacctcgccaaggcatgggaattcaccgaggaacacgcgcgcgaacgtgaatccgatgcgttgaccgacacccgtacggccgccgacgagtccggccagttgcagggttcggcggcgcaggcccgtctgctgggcatgctggtgcgcatcaccggcgccgcttcggtgattgccgtgggcaccggctcgctggtggagaccttgcagctcgcccatgcactggataacaagggcctgctgactgcggtcgattccaccgcccagggcatcgcgctgattcgcaaggcgttcgccgagctgcaggacgagaccgacaccacgttgcgtgcggtgaacgccccggccagcgtgtttctgccgcgcctcaacgccaatgattacgatctgatcgtggtggcgggcgacgccgagaactatgccgccacgttcgcccaggcctcccgtctgctgcgcgtgcacggcgtgatcgtgttcaccgatgtgctggcgttggaggacggtcagggcggcgtgatcaatccggccgaccgcagcgacaaggccatcgccatgcgtgagctgctcaccaccgtcgaagatgacgaaggtttcgagtccacgctcacccctgacggcaccggcctgctcatcgcctacaaaaagtaactctgtccttggctcccctcggagaggggagccactctatctcgcttacctcacaattgcgctgacggccacgtccacggcttcgtcggcgtcatcggttacggtgaccagtttcgggtcgatcgtcgagatcatgccatgctcggccaccggaccgttgagccagtcaaagagcccctgccagtattccttgccgtagagcaccaccggaatattcgccaccttgtgggtctgaaccaaggtcaataattcgaacatctcatccagtgtgccgaagcctcccgggcatacgatcacgccggaggaatacttgatgaacatggtttttcgcacaaagaagtaccggaagctcatgccgaggttcacccactggttcaacccctgctcgtgcggcaattcgatgccaagtcccaccgatttgccgccggccagtgccgctcccctattcgcggcttccatgatgccgggaccaccgccggtgatgacggcgatgttgcgcttggctatctggctacccatgcgccgtgctgccttatagatcgattcggtgcgctgggtgcgtgcggagccgaaaatagagaccgcaggtccgagctcggcgagcgccccgaaaccgtccacgaattccgattggatgcgcagcacacgccatgggtccatgtgcagccagtcggtgtcctgatcgggtttcagcaggttggcggtggtgttgtccgagggaatcatctggccgcgtagaatcaccgggccgcgatgataggtatcgcccagcggcgaggcgtcctccagatcgaccgggttcaccggtgtggccgcagcctcagttgccgtctcagcctccaacgccgccgcatcattcgcggctgtggcttccaatggttccatatcgtccacgactgcggacttggatgcggcctcggctagattctttgcttcagcggcctttttgccgtcgttcttcttggatttcttctgcttctttgccatccaatgtcctcctgtacggcgctatcgactcttcgcattctagcgcctgaagctctgcgtacgttttccgcgaaatcatccttgacttcgtgaagaacgtacggtgagtgacactgagcgtacgttttccgcgaaataaggcctcatctcgtgaagaacgtacggtgagtgacactcagcgtacggttttcacgaaacaaggccaacaatggagtagggaccgtctaagccatcagtggcggaagtcgatttccacactggcggtgccgtcggcgagggtgccggggtgttccgtgggcgtggtgggctctgtggtgtggcttggctgcccgatgccatcaccatcaatcgattcgtcatcctccgcatcagccgctgctgcggctgcggtcttctcgaatcgcttggactgacggctcagcagcacaccggaaatcgcggcggcgatcagggaggccaccagcacgccgaagcgcgcctcagcggaaagttccgcgttcttgtacgccagcgaagcgatgaggaaggacacagtgaagccaatgccgcaggcgacggcagcgggaatcatgtcgcgcacacgcagccccttggccatcttgagcccgcccacatgcgtggacagccatgcggtggtgatgatacccagaggtttgccgaccaccaaagccacaatcagtgcgatgaccagcggcgaggccaacaatagcgggctcatcgactcgaagtgtacgccggtggcgaacaaggcaaagatgggcagggccagcagtgcggagaatggctggagcttgttggcatagcgttcggcacgcggcgagagttcgccgtgcatttcacgagagggggtcagcaggccaaccagcacgccggccagtgtggggtgcacgcctgcctcgaacatcatgatccaagcgaggataccgacgatgccaaccgcgatccacggcacttttttcagtcgtacgaggtatgcccagatggcggcgcatacggcgatgccgatgaaccaataccaggcgttaatcgaggagaagaatacggcgatcagaataatggccagcaggtcgtcgacggtggcaagcgtcatcaggaacgcgcggatcgaaccgggcagggccttggcgaacagggcgagcacggccagcgagaacgcgatatccgtggcggtgggcactgcccagccgtgcgacatctccgagaacgggatgctgctgccggtggtggtcagaatcagcgtgccgggttcaccaggcccgatctgagagaacaatgccgtgacggccaggaacaggatgggcggggcgatcatgccgcccaccgcgcacagcatcggcacggcggccgctttcggattggcaagcgagccggtggtgagttcctgcttcagttcgaggcccacggtcaggaagaagatggtaagcagaccatcctgggcccagtggccaataggcaggtcgagattggtgtaggggatgaacagatgcgtttccgctacggtctcgaacgcatgcgcggtggcgggcagattcgcgagcaccaggccggtgagcgcgaagccaagcatgatgagtccggaaatacggtctgaggcggcgattcgcctgatggtggaccaaagtcccttcttcgcgccggcggtcgtggccatcgcgtctccttgctgcactctcttggatgaaccgtatgtaatagtacggaatatctcaggacgttccgctccgggctgagtcgcgaagggcaaccttagcccaaccctgtgtggccgactcaaccgactcaaacgggccaatacaattggaaaagcctcggaagcatttcgctttcgaggcttactgtgcgccagacaggattcgaacctgcgacctgctgatccgtagtcagctgctctaatccgctgggctactggcgcataccactgttgtccccgtggttcgggagtgcgccagacaggattcgaacctgcgacctgctgatccgtagtcagctgctctaatccgctgggctactggcgcatgttgtctttcagacaactcgatatataatacacgccgttcagctgaatgcaactcggcgtgttgcggcgagtcgcaccatcccgaccactaccgcaacggcgtatttactggcctcacgcctcgtgtgtacggactcggtcaagcaaaaccgactgcgcaactttgagacgtccctgcggcacatccacggcttcgcgcaggagtttgggcgtgctggaaccctctacggacgccttgtccacaatcacctgcctcacatcatccaaactcggcaactggaacatcgtgtcctgcaacgtacgttcgataatcgaacgcaaaccgcgtgcgccggtcccctgcttgatagcgatatcagcaatcgcccgaatggcctgttctgtgaattgcagatcgacgccgtcgacggcgaacagtttacggtactgcttgatcagcgcgttggctggctgggtgagaatcgccgtcagatcgtctacggtaagttccttcagcacactggtgaccggcaaacgtccgatgaactcaggcaacagtccgaactcggccagatcatcggcattgacctgttcgagcaattcctcgtctttcatgtcggcgtcgtgccaattcgcgccgaagccggtctctcgacggcctaatcgcttgcgaacaatgtccgtcagccccacgaacgcaccgccgcagatgaataggatgccgcgtgtgtccatctgcgcaacgtcctgctccttatgcttgcgcgtgccttccaacggcacggaggcgatggttccttccaagatcttcagcaacgcctgctgaacgccctcaccggacacgtcacgggtgatggaggtgttctcaccggatttgcgggcgatcttatcgatttcgtcaatgtagatgatgccgtgctgggctcggcttacgtcgccatccgcagcttggaggagacgttggagcacggtttccacatcgtcgcctacatagccggcttcggtcagggtggtggcgtcggtgatgacgaacggcacgttcattacgcgggccaacgcctgcgcaagataggttttgcccacgccggtggggccgagcaacagaatgtttgacttggcgacctcgacgtcagccaaagggtcattgctgcggcgggcagcacgcgtctgggtgggaacggattgcttggcttgtttgccggtctggccactgtgcccgttattcccgtcaagctgctcagcggactcctgaagctccatgttgacgcgcttgtaatggttgtatacggctacggataatgcgcgcttggcgttctcctgaccgatgacgtagcggttgagataatcgaagatctgagcgggcttgggcaggctcagcgaattgacctcggcatctttgacacgctcctcggagatgatgtccacgcacagggcgatgcattcatcgcagatggaggcattgggaccggccaccagttttcgtacctgatgttcggttttgccgcagaacgtgcaacggggtacgtcctcgttgtagctcaccacacgtcccatgattctcctttgccgactacgccgcaccgtcgaaccgccacgctgcgcattatcattgtcatccttgaaatacaatacccccggtcgttgccgaccgagggtattgcaatgtccggaagttttactggcggtgttccaacacctcgtccacgatgccgtattccttggcttcaggagcggtcaggaaagtgtccacttcgatgtcgcggcgaatcttctcgacgtcctggccggtgtgcttggcgagggtctcctccagccattcgcgcatacgcagcatttccttggcctgaatctcgatctccgtggccttgccgaagccttggtcgatggccggctggtggatgagcacacgggcgttcggcagcatcaggcgcttgcccttggtgccggaggccagcagaatggcggcggcggaggcggcctggccgaggcacacggtctgcacgtcgggcttgatgtactgcatggtgtcgtagatggcggtcatggccgtcatcgaaccgccgggtgagttgatgtacatcatcacgtcacggttcggatcttgggattcgaggaccagcagctgggccatcacgtcgtcggcggaggcgtcgtccacctgcacgccgaggaagatgatgcgatcctcgaacaggcgggagtaggcgtcctgggtcttcatgccatacggggtcttctccacgaactgcggcatgatgtaacggttggtcggcgcgggctgggctgcgcgggcggaggccggcatgaaaccggctacgccctgacggccggccaagcggtcggcacgggcggcgaactttgcttcttcacttgccatgagtctcactccccctgctggttgttgccgatggtgtccggcgtggtcacgagcttgtccacgaagccatagtcgagggcttcctgggcggtgaaccagtggtcgtattcgttgtcgcggtagatttcctcgagggtgtggccggtctgctcagcggtcagctcgctcatggtcttcttcatgtccatgatgagctcggcgttgatgcgcacgtcagtggcggtgccgccgatgccgccggaaggctggtgcatgagcacacgggcgtgcgaggtcaggtaacgcttgcccttggtaccggagctcagcaggaactggcccatggaagcacacatgcccaggcccacggtcgccacgtcaggctcgatgagctgcatggtgtcgtagatggccatgccggcggtgatggagccgcccggcgagttgatgtacagccagatgtccttcttcgggtcttcggcggccagcatcagcagctgagcgcagatgcggttggccatatcgtccttgacctcttcacccatccagatgatgcggtctttgagcagacggttgaaaatcgggtcgacggggccggccgggacgtcatcgcccgccatgaccggcaaggtcgcaaaggtattgctcaccttgattctccttctaattactcgaacattgttcagactaccgccttgaagcgactgaaggcggcttttcgcgtgctttttggcgggcagcgtagggatttcggtttattcgagggtgtcgaggacgtcgtcaatgaggaggcgggtctgggaggcggcatcgtcgcccagacgcgggaagcgacgggcggcattggcggggctggcaccggcggctcgcgctacgttggacttgctggcaccatgggccacggctttttccgcgagccgatcgaccagtgaatcggcgacttggcgcatctgttcggccacccataattgggccatatccgcaggtaagtcgtagtcttcggccacatcgctggctgcctcctgaatggcggcccataacaccatgaatggctttcgatagtagtcaatctgctcagtgagcggctcagcggcaagcaattcaagtgccgagcgaatttctgtattttctgacatagctttctttacctcggctcccctctctgaggggagctgtcgccataggcggctgaggggagtttcgaccggggcagctcccctcagagaggggagccagaatatatgtatttacttacgactcagcaaccactttgatatcaacgacgacgtggccacggccatgccgaccggcacaaagaaggtaatcggcgcttcagagagctccatcaccaagcacatggccataagcggtgcctgttgtgaggccgaaagcaacgaagccgcaccgatcaaggcacacgcggttaccgaatcggtcggaaacatcagtatccatacgagaccgagcatcgcacccagcgtggaacctaatgcgatgccgggctgcagcacaccgcccgacgcaccggagcgaatggtcatcagcgtcaccagcgctttggcaacaaaggtgagtgccaacacacccagcaacatccagatattggactgggacagcgggaaaccggcgttcatcacggatccagaagggccgctcccaccctgaagcatggcccagaacgatgccattccagagcccgctcccccgccagaggccgaatcggatacattaccgccgcccgtcagcaagttccatggagaggcggccgctgaagatgccgactgcatggcaccagcagtgccggcggtttcaggaatgaatgtgctgaatccaagttgcgctgcggcacggccgttgcccatcacctgcggcacaacaatcgccaccaaaccggtgatgagaccagccagcgtcatctgccacagaatagccttaccggttggcttgtgcgcttccgcccattgcgaaccttttcggaacaatgcgccgcccactccacatgccgcaccgcagatcagagcgaacagcattaacgttggcgtggattccggttgcatggcggtaatgtcgtagaacaggcaatgccctttgatcgcaaccgccacgaatgcggcaatggcagacatgcccagtccaaacgcaactttttcgattgtcacatctaccaacaggatttcgacggcgaagaacatgccggccagtggcgcgtcatagacgcctcctagaccggcaccggcagccactgccaccaccatgcgccggtcgatgccgtcaacgccctcgatatggaacaggtcgcagaaacgttgcgcgagcatggcgccgagttcgcgtggggcgacttctcggccgatcgaggcaccggagccgacgatgaaaatctgcaataccacatgcgcaatggtttgccagaaaggcattcgctttcccgccacggccttcttgactgagggcaccgcagtcgttttgtgtcgcagcagataccagataatgcctgcgatgctgagtcccacggtcaccgatatcgcacggcgtgcagcgggcacgccgaatggaccaggcaattctgggccttcgatgtagccgagcagcacatgttcaacgccgtagagcaacagggtcagcagacctgctcccacaccgatgagcacgccgagcacaatggtcgccgcagcgagccaaccaaggcgtttgatagtaaccgttggctgcatgtcaacctccgcaccctatgcaacgagtatgccttgggaactcccctcagtctcgccacgctcgacagctcccctcaaagaggggagccaaagaaatagtccttttgccagaataggaagagcccggaaccatgaaacacgattccgggctcaaacaatcacgctaacgcgatgaggctatgctcactcagcatccttggcgtcatccttggcggacagttcgtcggccacggcggcagcagcggaagcggcctcgacggactcggactcttcgtcctcagcggcctcgcccaggaaggcggagaggtccacaacctcgccatcagcggtgaacttgacggcgcgcatgccggcgagcaggcccttggaacggccgacttcctgcacagcggagccaagctggccattcttgatgatggcctggatgaagttgttcggatccatgccgtactgctgggcgatggaagcgaggaagttgaacacgtcggactgggacacctgaacgtccagcttctcggccagagcgtcgagcaccatctgatcgcgcagatccttctccacggtctcctcggcctgagccttctgctccttggtggccttctccgggtccggggtcatgcccttgagctgctcttcgaccatgttggccttgacgcccttcggcaccgggatctcgaggccttcctgcagcttggcgatgaaggcatcgcgagcctcggtggcctgacgaccttcggcgtcctgagcggcagccttgcggatgtcagccttgagctcgtccagagtgtcgaactcggaagcttcggaagcgaactcatcgttcagctccggcagttcctcagccttgacggagttgaccttgaccttcacggtggccttctggccctcgtgctcgccggcttccagcgtgccttcgaaggtggtctcctcgccggcggacaggccgtcaagggcctcgtccagaccgtcgagcatggtgttggagccgagctcgtagctcacgccttcctgggagtcgacggtctcgccgtcaatctcagcagtcaggtcgatgttggcgaagtcgcccttggcggccgggcggtccacgccgaccaaggtgccgaagcgctgacgcagggtctcgaggcgcttgtcgacgtcctcatccttgacttccggcttggagatggcgatctcaagaccgtcgatttccggcagttcgatgtcaggacgacgctcgacggtggcggtgaacttcagcttggtctcgtcgttggcggactgcggaacatcctgcacgtcgaactccggctgagccatcggacgaatcttcttctcatccagggccttggagtacagctccgggaccgcgtcgttcacggcctcaccggcgacggcggcgaaaccgatgcgctggtcgatgatcttgccgggaacgtggcccttacggaagccgggaacgttcacctgcttggcgatttccttacgggccgcatccagatacgggttgagctcttccggttcaacagtgacggtgagcttcaccttggtgggctcgaggttacgaacgctgatcttcacgctaatgactcctcaaaagtcgttatttcttacagttctgccgtaaggcaacctctacatgataacgccacttacggacggtgcaatgagtttcacttgccagttccttgcgccctgctcgatcaggaacgtctcgacgtccacttccaccgggtcttccacccagcacaggttgcgtaggatctgtggcttgatgatcatctcggccggcgtgcgggtgtcttcggcgatgcggttgatcacacgccgcacccgttgcagacggtcataacgctccggatggcgctgttgccacagccgcatggatcggggcgcgttcaccacaccgttttcgtcctgttcgggggcgggcatggtaggccattgggtgggcttcagggctatggctcgatcgatggcctgcttccagaccttcggtttgaccgcacgctgaatcggcgcgtaccgctcgaacattttgtcctgctcggtgccggtatggatgcgcacacgctcgttcagggatcggagcgcgcggaattgggcagcattgtgcggcttgttggtcgccgcctcgatgattgatgaatcggccaataacaggctgggcgcaatatcgtattgccgggcgagtcggtcgcgctcctcccatagggatttggcgatggccaagccccttggatcacgactcagctgggtgatgcgcgagatacgcagccaaggaatcggatgcggtttgcgcggggcaaggcccgcaaccaaagcgtgagaaaactcttcagcggcccactcgtccttacctgcggctttcaggtcacgacgcatcatggtttcaagttcgataagcacctccacgtcgagcgccgcatagttgcgccagtcgcgcggcagcggacggtaggaccaatcggcggcggaatgctctttggctagcgtgatgccgaggtagtgttcggtgacggcggccagaccaaagcggtgcaggccgagcaatcgcgccgctatttccgtgtcgaacagggctttgggtttgagcccgatttcggcgaatccgggcaagtccatcagagaatcatgcagaatccacgtggcgtcgcccacggcgtcattgaattcattccaatcagctccggcccgggtcagggcgacgggatcaagcaaggcgatgcctgcaccctcacgtttgaactgaatcagccaatcctcgtgtccatagcggaagccggacgcccgttcggcgtcggcggccagcgagcccgtcgcctcggccatcgcatcgcagacacgatgatagccgtccagcgtcgaagtgacatcgggtactcccccgcgaggctctttcagcagtcggggttcggtgtcacggacgtcactcaactggcgtcatcctcctcaaaacggatggtggatctgatgaatgcggcccacgagcggacttgtgcgccggcgtccatagtaccgtccggcccggtcccgtcaagcggggtccatgagacgcgaatctcacacccggcgctggtggagccggccatcgagccaaaagccgtgttttgggtcacggtgactgtgccggataccgaatccggctcgatgccgtcgaaatagtcgcacatgtcatcccagtacatgccgggggtcagagaatcgttttcggcggtttccagcggcagtcgcgcgaacgccacgcaacgccagttggaatcccagtcaatgcgcagctcatgagcataaagcatcatgatccagcctgtggcgattcgtgattcggcatcgctgccaagaccggcggaaaaggcatcgccgagggcacgctctcccgcttcgaattccacgccgataccataatcggccaaggtggaaggcacgggaatctcccgatagcgcacgtcatggatgcgcttcatggtgctgacggattcgacggctgcccatacttcatccggcacaccctgagggcgcacggggcgtccgtcgttggactctcccgtaggaaatgcgtagatgtcggccatatctctagggtatgggcgaacgggccgaatcgtggtatttacgcgcggttcggccctgcaatttaatacacggtgaagccgtggtccttgaactggttggtcacccgttcgcgggtggcggcgttgggtcccttctggttctccagcgggtatgggatgcgcagttcgtgccacttcgggcggccaagctggtggaatcccagcacgtcgatgtgttcgacggcatcaccgaaggactcgcagatcttcgccacgttttcgacgttctcttcggagtcggtcaggcccggcacgagcacaaatcgcacccagatcttcttgccggccttggccagtcgctggccaaaatcgatggtgggctgcaaggtgccgccggtgaccttgtgataggtctcctcgtcgccggatttgacgtcgagcagacacaggtcgatgtcctcgagcatctcgtcggtgtaattcgtgttgaggaagccggacgtatcgaggcaggtgtgcacgcccatctccttggcggcatggaacacacgcgagacgaaggtgggctgcatcatggattcgccgccggagaaggtgataccgccatgcgtggccttgaacaggtccttgtaacgatcgaccttcttgatcatggcgtcaaggtagacgggcttgccgtcgcgcatcttccaagtgtccgggttctggcagtactggcagcgcagcgggcagccggacatgaacacggtcatgcgggtgcccggtccatccacggaggtgttgatgtcccaagagtggacgaagccgatatcaccggatttcagggcggaaaggcggtcacgtcggtcgagtccgattggggattcaaagccggaaaggccgcccatcaaagtctgcgaggcataggtcttcgattccttgagcatatgcctggtcgtggtgcggaacgtgggtgttgcgggcatcgttgtcctcctgttccaaatgatgcgaaagtctgtgggaaataaggaaggggtggagccgtgccccaccccttcagttagtcattgccgcggttcgcggggttggtcatcagtcgacgacggcaccctggtggaaggtacgggagatgacgtcgagctgctgctccttggtgagcttgacgaagttcaccgcgtagccggagacacgcacggtcaggtgcgggtacttttcggggtgctcgacggcgtcctccatggtctccttgcgcagaacgttgatgttcgcgtggtagaggccgtggccgttgccggcgtccaggatgccgaccaggttgccgatgcgctcgtcctcgtcgcggcccaggccatcaggggtgatggtgttggtcagcgagatgccgtcaagagcgtcgttgtagtcgatcttgccgacggagaacatggacggcagcatgccgtgggagtccatgccgttctccgggttggcgcccggagcgtacggggtgcccttggcgtggccggacgggaaggaaccggtgttcttgccgtactcgacgttggaggtgatcgtcaggatggactgggtcgggacggcgccgcggtagaccgggagcctcttgacctggcccatgaccgtggagacgacccacttggcgatgtcgtcggcgcggtcgtcgtcgttgccgtagaccgggaactcgccctcggtgcggtagccgacgatcaggtcgtcgtcggcgccctcaacgtactcgtactcgtggccttccagggtcttcgcgtccttgttgtagatcgggtagaccttggcgtacttgacggcggcgagggagtcggcggcgatggacagaccggacatgccgcagccgagggtgcggtacacttccttgtcgtgcagggccatctcgatggactcgtacgcgtacttatcgtgcatgtagtggatgatgttcagggccatgacgtaggtctcggacagccattcgagggccttctcgtagttgttcttgaccttctcgtaatcgagggtgccgtcggcctccggggtaatcggctcgatcacgcccttgtcgatgacctgcatgccggtcatctcgtcgcggccgccgttgatggcgtacagcagggccttggcggagttcacgcgggcggcgaagaactgcatctgcttgcccacgcgcatcggggagacgcagcatgcgatggcagcgtcgtcgccccagtggctacgaatttccttgtcggactcgtactggatggccgaggtgtcgatggagatcttggcgcagaagcgcttgtaggcctcaggcagcttcggatcccagaagatggtgatgttcggctcggggccaggtccgaggtgctcgagggtcagggtgttgagcagacggaacgaggtcttggtgaccatcgaacggccgtcatcgccgaagccggcgtcggaccaggtcgcccagtacgggtcgccggagaagatcgaatcgtagtccttggtacgcaggaagcgcacgatgcgcagcttcatgacgatgttgtcgatgagctcctgggcgtcggtctcggtgatcttgccggcctggaggtcgcgctcgatgtagcagtcgaggaaggcggagttgcggccgaaggacatggcggcgccgtcctgggacttgatggaggccaggtagcccatgtaggtccactgcacggcttcctgcgcggtctgggccgggcgggacaggtcgaggccgtactcgttgccgaggttgatgagcttcttcagagccttgatctgctcgtcgtgctcctcacggaagcggatccagtgctcgatctccggctcggtgaagtcgttgcggtacggcacggagtccttgtcgcgcttcttgaaggcgatgagcttgttcacgccgtacagggcgacgcggcggtagtcgccgatgatgcggccacggccgtaggcgtccggcagaccggtgaggatcttgttgtggcgggcgaccttgatctgcttggtgtacacgccgaagacgccgtcgttgtgggtcttgcggtacttggtgaagatcttcttgatctccggatccggttccttgccggcttccttgatggcctgctcgaccatgcgccagccaccgttcggcatcatcgcgcgcttgcagggaacgtcggtctggaggccaacgaccacgttatcgacttccggggagtcgatgtagccggccgggaaggcgtcgacgtcggccggggtatgggtgtccacgtcgtagacgcgctgcttgcgctccacggccaggtagttgtcgtcgaggtacttccacaggtgcttggtcttctcggtggcaggagccaggaatgtctcgtcgccctcgtacggggtgtagttcttctggatgaagtcgcggacgtcaatatccttctgccagttgccctcggtgaagccggcccacgccttggcgtcgagctcctcctgggagacagctgcattttccactgcggtcatgtcactccttaaatggggttgtaggtttcgcatcttcacggaacccttggttcaacagtgtagttggcacttgcttgagaaaagctgaaattgggagtgagctatctcacattgtttctgtgaacgctaccattccaatggcttctagatattgatgggactattgcacgtctccagatatgggaaaccgctcatactgtgatgttcgtatgagcggttcggtcttgagattgacagcagaaccgtatccgtcagttttcgaccgtcaatcctcggggcgagcctgtgcgggtttcacgccgtagttcttccagcgccggttctcctcctcccatctggcattgcggtccaccacgatgtcccacgcatgttcggcgtcttccttggtcttgtacggacccatgcgctgttcgatcggtgagaccatgcccaactcggcctgcttcttgacggtgttgaaataccactgcttcttgttatcgtctgtcattggtacctcctcaacggtattacttgctcccgctggcgggagcaatatatgtttattccctgaatgcgttggtgacgggcagtcggcggtcgcggccgaacgcgagggccgtgaccttcggtcccagcgggtattggcggcgcttccattcggcgcggtccaccaatcgcatcacggtgtctacggtgacctggtcgaagccgtcggctaacaggtcggcgcggccgtgcgcgtgctcgatgtatgcggcgagcaccttgtcgagcagcgcgtattcgggcagggagtcggagtccttctgcccggggcgcaactcggccgagggtgccttctcgatggaggagaccggaatcatcacgccgtccttcaacgggatgccggtgttgccgtcctcgttgcccacgatcttgagaccgccgatgccgacgcctgcggccgcggccttgttacgccaacggctgatctcccagacacgggtcttgagcaggtccttgatgggtgcgtagccgcctaccgcatcgccgtagatggtcgagtagccgcaggcgagctctgacttgttgccggtggccacggcgagcagaccgcgcgaattggagctggccatcacgatcacaccgcggatgcgggcctgcaggttctcggcggagatgccatcaaggtcaagttgctgttggtaggcgttgaacaatggctcaatgggctggacctcgtaatgggcgccaatgttggaggccaaatcggcggcgtcgtctttggaaccgtcggaggagtacatggagggcatggagatgccccagacgttctcgccgccgcatgcgtcggccgccatggcggctaccagtgcggagtcgatgcctcccgagaggcccagcgtcacgccggtgaagtggttcttggccatgtagtccttgaggccgagcacgcaggcagtgtatacctcttcgtccgggtcgagttccggaacgatctcggccttggcctgatgttcggcggcggaatcgaagtcccagaacgtcaggttttccatgaacatcgggctgcgttcgataagcgtgccgtcggcgtcgaccacgaagctgccgccgtcgaagacgaggtcgtcttgaccgccgacctgattcaggtagatgaccggggcgttaacctcggcggcacgacgctgggcgagctcgaaacgggtgttggtcttgccttcctcatacggcgagccgttgatggtgagcagcaggtcgatgttcttggtggccaggtcggccaccgggccgccgtcctgccagatgtcctcgcagatggccacgccaatggtggcgccgtccacgtcgagggtcacggagcggtcgccggcggagaagatgcggaattcgtcgaacacgccgtagttgggcaggaagtgcttgtcgtagccggcccagaccacgccctggtgcaagaccaccagtcggttgcgcggcttggaggtcttgcggtcggtgcccacggtgccgaccaccacgaacagatcgccgaggccgtcgtcgttgagctgagtggcgagttcgttggccttgtcccatgcggcttggcggaaggtgcggcgcagggccagatcctcgatggggtatccggtgagggtcatttccgggaaaacaaccacttgggcgtttcctgcggcggctttacgggagtagtcgagcaccttggcggcgttggcatcaagcgcgccgacgcaggtgtcgatctgggcgagtgcgaagcgaagctgtgtcatagcttcttagtgtagccgcgtatggcgtcggattgcctgttcttccggcttggcgtcattcattaggtcgtttttgcgttcattaggtcactgcaatgcgatatcagtcgttgcaatggcgcgattccaacaaccagtatcgccgttcaccgacctaatggacgatgaatcgacctaatgaacgaatgccactcccctcagtcagcttcgctgatagctcgtcctgcacttatggacgggcgaggcccgcgcatatctggttcggctgtcgcctcaccttcggctacagacagcccactgggctgtctgcctaacgcctcagcctccggaggcgagccagaaaaggatttacttcagctcgttgagcacgcgcagagcggtgttgacgtagaagttgacgaaggtgggaatggattcgtcgagacccacgaaatgcgggctatgccagtcggcgcaaccttcctggccgtttgacccgacgaacgcgaacaccggcaacgtcaccttggcgaattcgcagaagtcctcccccgccatcgactgacgtatcggttcgagctgcgcgtagtcgttgacatccgccgccacggccttggcaagacctggatcggagaccagcgggtcttgaaagtcatcccagaccacgtcggcgctgatgccgtatgcctcggcggtgtgttccaccacttccttgaatcggcggccgaccagattgccatccgacttgtggaaatagcgcacagtcccttggaatccggcctcagcgggcaccacgttccacacatggccgccgtgcacttcggtaacggacagcaccagcgggtggaagggcgtgacgttgcggctcacgatggtctgcaggctcagaataatactggcgagcgcttcgatgggcccggtgcccttgtacgggtagccggcgtgggttccttgggcgtggagggtcacgcggaatttcacgcagccggccatcatcggctcaacgccgatggccagctggccgggcgcatagttggggttgttgtgcgtgccgataatggcttcgacgtcatccacgagtccggcgtcgatcatggcgcgagcgccttggccggtctcctcactcggctggaacagaatcttgatcgagccggcgaacttgtcacggtgctcggcgagccagaaggcggcaccgagcagaccggtcatgtgcaggtcgtggccgcagccgtgcatcacgccttcattgacggagctgaactccagtccggagtcttccacgatgggcaggccgtcgatgtcggcgcgcagcccgatacgcggcccgggaccggcctcgccctgaatgagccccacaacaccagtctccagcgggttgtgcaggatctcgatgccgtacgccttgagctggtcggtcagatagatgctggtgccgaattcacggaaactacgctccggatgggcgtgcaggtagtggcggatggtgatgagttcgtggtcgatgtcgatatgttcactcatggttcccgattctagtagcgcgaagaatatattgcggccctcgctccatattggcgagggccgcgatctatggggtcagtatgccttgttattgctggcgtttgagcagtcgtttggcgatggcgttggcgatgccctgcaccacctggaccagtacgatcatgatgatcacggccgtccaggtgacggtctggtcgaacttctggtagccgtaggcgatggcgaagttaccgagaccgccaccgccgatgtagccggccatggcagacatgtcgagcacgccaatgaacaggaaggcgtaggccaggatcagcggtgccagggcttcggggatgagcacggtgcggatgatggtgagcttgccggcacccatcgaacgcgcggcctcgattactcccgggtcgaccggcacgagattctgttcgaccagacgcgaggtggcgaaggtgcacatcaccaccatcgggaagatggcggccacggtgccgatggacgtgccgaccacgacgatggtgagcggctgcatggctgccaggaagatgatgaacggaatcgggcgcacgatgttgacgatgatgtcaaggatgcggtagacgaccgcgttctcgaacaggttgccggggcgggtgccatagagcaccacgccgaggatcaggccgaggaatccgccgatgacgagggtgacgagcaccatggtcagggtctggccaatggattcgaacagtagtggacgcagcacgttccagtcgctacgcgggttggcgaggatgatcatgcgttggctccttcatgtgcggcggcggacgcggcgggcgcggtggcagtatcggccgccagtgggtcatgggcgcggtcttcggcgtaggaggcatgtccggcgactgcgtcggcgtaggccacaggctttgcggcggtgccgaagtcgatgacgtcgctattggcggcgagctcgcgcaggaattcgtccacatgccagccgggcccgttgaattcgtaggtgatggcaccgatggcggtccccttgaccgtgtcgatgccgccgtagagcaggctggattcgacgccgtatttggcgatgagttcggagatattctgtccggatgccttgagttcatggccttgggtgccggaaacgtccttttggcggataagcacggtgacaatgcggcccgaccattcgtgatgcaatcgctcgacccggtcttcctcgggcaggccagacaatgcggtggcaatgaatcgcttggtcaccggctgctggggtgcagcgaacacatcgtatacgtcgccggattcgaccacgcgtccggcgctcattacggccacgcggccggcaatctgctggaccacgttcatctgatgggtgataagcacaatggtgatgccgaattcctcgttcacacgcttgagcaaggccagcacttcggtggtggtttccgggtcgagcgcgctggtggcttcgtcggcgagcagaatctccggattagtggccagtgcgcgggcgatgccgacgcgctgcttctggccgccggacagctgcgaagggtatttgtttgcgtgctcactgaggcccacgaattcaaggagttcgttgacacgacgatcctgatagtccttgcgccagtgatcgagttgcagtgggtaggcgatgttctgggccacggttttggtggagaacaggttgaactgctggaaaatcatgccgattttctggcggatgggccgcagcttggtctcactcagagaggtgatatcagtgccaagcacggtcacagcgccggaggtgggtcgttcgagcgcgttgataagccggaccagtgtggatttgcctgcaccggaatagccgatgatgccgaagatgtcgccgcgatcgatggtcaggctgacgtcatccacggctcgtgcgatgttcgcgccgcgtccgcgtgttttgaattccttcacgacatggtcgaaggtgatgatggggtcgctcatagtgctccctgatgctggttgttggtgtccggtcacggaagcggagcgaatcccgattgttggctcgggtactcgctccgcttggtggtaatggctatggataggttagtcgtgcactcgtatcagccacggctcactgctgggctttggcgtccttctcaatgtcggacaggaagccttgcagctcgctggcgctgaacttgtcggcgaacaccgcggtaccgccggagttctcctgcagggcgtcgagcacatccttctgctggtagatggaaacgagcttcttgtaggtctcgttgttcacgtccgccttgcgggccacccacacgttgatgtaggggcgagcttcttcggattcggcgtcatcctggtagatggcgtccttcgggtcgagaccggcgtcggccacgtagtcgttgttgatcacaccagcggcgatggtcgggtccttcagggtggtggccacctgttcggccttgagcggggtgaccttgaccttgctcttggcttcgtcgatgtcggccggggtggagaaggcggtccagtcgtccttgagcgtcacgagaccggcggccttgagcacgccgatagcgcgggcctggttggtttcgtcgttcggaatggtgacggtgtcgccctgcttcaggtccttgatgtccttgaccttggtggagtacacgccgagcgggtagatggcggtgccgccgatgggctgcaggtccttcttgttgctcacgttgtagttggccaagtagagcaggtgctggaattcgttgaggtccagctcgccggagtcaagggccgggttttcggaggtgtagtcctggaagtcgacgatgtcgacgtagatgccggccttctcggcgttctgcttgaacttgacccattcggggttggtagcgccgaccacgccgatcttgaccgggttgcccttgctgcccttggcggacgactcgttggcaccggcaaacgcgcggtagccgaagaacgcggccacggcgataatcgccacgaccacgatggtgatgatgacgttgcgggcggtgtggttcacacgcaccggctcgttattgttaggagcggccggggttgccggctgggttgctgctgtcattggatttcctctctccaaaattgatgtcgggtaacaccataacgcgcttgaaccgcgaaagtgacggaaaatggccgattgccgtataggtgtcttttatggcgcgcatgcaatgtccgggattcgtgcgtttgataacccgctataggcgtgctgaacacgccggaaagcacgtcgagaggagctttgacaatggaagctatgactaccgatactgccaatgccgatatccgagccgtattcttcgatatcgatggcacgctcaccagtttcacgacccatacggtgccggattccacaatcgaggcgattcaccggctgcaggccgcaggcgtcaaggtgctgatttgcacgggccgcgcgccttcacagatgcacgtggtgctggataccatgccggtgacgttcgatggcgtggtggcgttcaatgggcagtattgttttgatgacaccggcttctttgcctcgcaggccttggatactgctgatattgaggtgattctcgactggctggaccgtcaccccgatgtggtgtgcaatttcggcgagaaggattacgtgtacttcaaccagtccaatgatctgcttcgcgccacgtggagcaaactgggcaaaaccgcaccgacccggtatttcgaggacccgcgcacccgcgcgctggatcatgagaccttccagatcagtccctttgtcgggcccgagctggaggccgaactggtgggactgtgcagcaatgtgcgcggggtgcgttggcatccggatttcacggatctgattccggccgatggcggcaagccgcgcggcatccagcggttcatggcgcattacggcatcacgcgcgagcagaccatggccttcggcgatggcggcaatgacacggatatgctcgcctacgccggcatcggagtcgcgatgggcaacgcgaccgccgagccaaaggccgccgccgattacatcaccgatgacgtggaccacgacggcgtactcaacgccctactgcatttcggggtgctacgcgattaaaacatcacaacagttcgctttgttctgccccgccgtgacagggcttatgaataagcaaagggctcgggacgaatcccgagccctttggtgttagcgaactaacaacaccgtggaggtgttatcactcgttgtcgccagcggtagcggcggtagcggtgacggcacccttcttgtcggtgttcacgccggagtacacccagtcggtgtagtccgggtggtcgtagccgttgtcgacggcgaactggaaggcctcatcacggaacttctcgagctcgtcgatcttgtcggcgtacttgtcggcgtcgatcatgcgcagagcctcagcggtcagctcgtagcggtcgatgcggttgacacgaaccatgtcgtacggggtggtggtggagccctcctcctcgtagccgtggacgttgaagttgtcgtggttcggacggtcgtagatcaggccacgcacgtcgtgagcgtaggagtggtacgcgaacagcaccggcttgtcggcggtgaagatgtcggcgaactcctcgtcggtcagagcctcgtcgttctccttggcggactgcagggagagcaggtcggcaacgttcacaaccttgaacttgacgcccagttccttcagcttgtcggaagcagccatgatctcctgagtcgggacatcgccggcggcggcaagcacgacctcggcctcatcgttgttcttggcggtggaagcccaatcccaagcggcggcacccttctcgagctcggcacgagcctcgtccagggtcagccaggtggcagcgggctgcttgccggcgatgatggcgttgatcttgttggtggacttgtagcacttctcggcgatggccagcagcatgttcgcatcggtggcgaagtagatgccgatgacgtggtcgttgtggaagcacttgttcagcaggacggaggtgacacccgggtcctggtgggagaagccgttgtggtcctgacgccaaacgtgggaggagaccagcaggttcatggaggcgatcggcttgcgccacggaatctcgcggacggtagcctcaagccacttggcgtgctggttcagcatggagtcgatcacgtggacgaaggactcgtaggagctccagatgccgtgacgaccggtcagcaggtaggcctcgaggaagccttccatctggtgctcggacagctgctcaacgacctggccggagacgtgcatgtgctcgtcgacctcgtcggagatgtagccggcatcccactgcttgttggtgacttcgtaggaagcctgcagacggttggaagcggtctcatccggtccgaagatgcggaagtcgcgcgggttgttcttgatgatgtcgcgagtgtaggcacccagggtacgggtggcctcgagctggccccagccgtggccgtactcagccacttccttgacctcgtagtcctcgaggttcggcagcttcaggtcgttgcggatcacaccaccgttggcgttcgggttggcaccgatacgcagctcgcccttcggcatgaaggcaaggacgtcgtccttgacagcaccgttggcgtcgaacagctcttccggcttgtaggactcgagccagttcttgagaacctcgaagtgggcctcggtgtcgcgggcggaagccagcggcacctggtgagagcgccaggagccctcggtcttcttgccgtcgatgtacttcgggcaggtccagcccttcggggtgcggaagatcagcatcgggtagaacggacggtgcacgttgtcggtctgagcggtggccttgatgtcgcagatctcgtcccagatggtctcccacagctcggcgaagcgacggtggatggacatgtggtcctcatcatcgaagccagcgacgaactcgtagggctcataacccatgccgtggaagaactcgtggagctcttcgtcggagatgcgggacaggatggtcgggttggcgatcttgtagccgttgaggtgcaggatcggcagcacgataccgtcggtgcgcgggttcacgagcttgttggactgccagccggtagccagcgggccggtctcagcctcgccgtcgccgacgatggccgggacgaacaggctcgggttgtccatgatggcaccgtaagcgtgggacagagcgtaacccagctcaccaccctcgtggatggagcccggggtctccggagcgaagtgggacggaataccgcccgggtaagagaactgacggaagaacttctgcagaccagcttcgtccttggtgatcttcgggaaggtctcggtgtaggtgccgtccaggtaggactgggaggtaccggccgggccaccgtggcccgggcccatgatgatcacggtgttctggccgtggtcagcaatgaaacggttgatgtggccgatgaggaagttcaggccaggggtagtgccccagtggcccaccagacggtgcttcacatcttcgcgggtgaagggctccttcatcagcgggttggaacgcagataaatctggccgatggaaaggtagttggcaacgcgccagtacttgtcaacgccttcgagggcttcctcggaaaccggagcgttgagcttcttccaaggggtgccaataacaggactcgtcatgtgtactcctgtactcctgcacgtgatcgtgcgattgattatttctgttcggtcacggtccctgacccttgcggtgccaaggttttccgttcccaatcaatcgtcatggtacgaggacaacgcgacttttgaacgatttcttgcgggtgtgttcgaaattgttgcggatatttcagtatttgtgcggttcgactgaccgtttgtcaacattagttttttcaacatactttttcaaaacggcggaagcatgcggaaatccagcatttggctagaacagcgcacgttcgatttcccatgttcgaaatcggcgtgttgtccgtctacaggcatgtagtttgttcgatttgcgcacatagtctctgcgtgtcggccttgtcgccttgaccagtgataatcaggggtgttcagcccacgtaaaattccaatgaacgttaggggaatatcaatggcaaacggtcctgtgcttgtcgtcgacttcggcgcccagtacgcccagctcatcgcccgccgcgtgcgcgaagcaggcgtgtactccgagctggtccctcattccatgccggtcgacgagatcctggccaaggatccgaaggcgattattctgtctggcggcccggcctccgtgttcgagcccggcgcgccgaccatagacaccaaggtattcgaatccggtgttccggtgcttggtatctgctacggcttccaggtcatggcctatgagctcggcggcaaggtggataaggccgcgctcggcgaatacggcaagacctcagccaccatcgacgacgccgccggcatcctcgccgactcccccgccgagcagaccacgtggatgagccacggtgtggcggtcgaacaggccccggccggcttcgaagtgctggcccacaccgaaggcgcgcccgtggccgccatggcggacgaatcccgcaagctctatggtgtgcagtggcacccggaagtcaagcactccccgcttggccagaagcttatcgaaaacttcctgcaccgttgcgccgcgctgcccaacgactgggatgcctcctcgattatcgaggatcaagtcaagaagatccgcgagcaggtcggcgacgccgaggtgatctgcggcctgtccggcggcgttgattccgccgtggccgccgctctggtacacaaggccatcggcgaccagctcacctgcgtgttcgtggaccacggcctgctgcgcaagggcgaagtcgagcaggtcaagcacgacttcgtcgccgcgaccggcatccgcctcatcaccgtcgacgccgccgacgacttcctcgacgccctcgcaggcgtctccgagccggagcgcaagcgcaagatcatcggcgagaagttcatccgcaccttcgagaaggcccagcgccaggtcctcgaagaggccggcgcccgcggcaaggaggtcaagttcctcgtgcagggcacgctctaccccgacgtcgtcgaatccggcggcggcgacggcgcggccaacatcaagagccaccacaacgtcggcggcctgcccgaggacatcaagttccagctcatcgaaccgctgcgcactctgttcaaggatgaggtgcgcgccatcggcaccgagctcggtctgcccgacgaaatcgtctggcgtcagcccttcccgggcccgggtctgggcatccgcatcatcggcgagatcaccaaggagcgcctcgacctgctgcgcgaggccgacgccatcgcccgcgaggaactctccaaggccggtctcgaccgcgacatctggcagtgcccggtcgtgcttctggctgacgttcactctgtcggcgtccaaggcgacgagcgcacctacggctcgccgatcgtcctgcgcccggtcagctcggaagacgccatgaccgccgactggtcccgtgtcccctacgatgtgctcgccacgatctccacgcgcatcaccaacgaatgccgccagatcaaccgcgtcgtcctcgattgcacctccaagccgccggcgaccatcgaatgggagtaagccgatagggctttgacctgctcttttgagtgccgtggtgtaccgctgagtttcgtttcgtacgagagtcatggcaaaaccgccagcgacagcagtgagtaaaaacgatttcctagcctccgttccctcgttggaacggaggctttttctttgccgttttactccctttcacctgcgatttcgccatttactccccgtgtttcaagacaacaaggcacggggaggtattcgagggaatgggagtaaggatttatcccaagtgagttgacgcgcggtttttgtccccgagggcgaaacggggccgtttcggggcccgtgaaactcaaatcgaactcaacgggcattttttgctgggcgttccaatgttcccgttccgtgggataccctgattctctctgtggtactgtttgtggtgtttcctctggctggcggtatgctgacccgttcggctgtcatcaagcggaaggggcagtgtactttgaggagactttcatccatatgtttgacagtgtaactaccattggcttattgctgacgctggtgatgattttctcgttccaaggcaataccattctggaaaaacctctgcacattgttttgattgcggtaccgctgattttacagaccttcctgatttttgcgattgcgtatatcgcttgccgggttttgaagctgccctacaagattgctgctcccgccggaatgatttgtgcttccaacttctttgaactggctgttgctgttgcaatcgccttgtttggaacgacttcccctgcggcactggcaacgactgtgggtgtgctgacagaagttcccgtgatgctgttccttgtaaaaaacgcaaataaaacgaaagactggttcaaatatgagtaagaaaaaggtggcatttatctgcgtccataattcctgccgcagtcagattgccgaggccttgggaaagcacttggcttccgatgtgtttgaaagctattccgcaggaacggaaacaaaaccgcaaatcaatcaggatgctgtccgcattatgaaagaactgtacgggattgacatggagaaaacccagtattccaaactgatctcggatattcctgcccctgatattgcaatctccatggggtgcaatgtgggctgtcctttcattggtagagcatttgacgataactggggattagaagatccgaccggaagcgaagatcaagtctttgtcgagatcattcgagagattgaaaaacggattctacagttgaagcagtcccttatttgattgaaatagcactctgcttgtggtataatacagatgatccaaaccattgcttttctgctgataacattgggcttgataatcttttgataacaggagtccgacaacgccgtataagttggataattggtatcaaattgagcaactaagagtcaaatcccctaaacagtattgtttagaaccagttttactttggcgagtgggagtaaactggagcggattttgcgcaatcgaaattccgtccgtagagtgtcgcagtgtgccgccacgtacgaaaaagcgtaaagccacctgtgattttgggtgagtaaaaactattgagaccctctggaaacaacgttttcagggggtctctttatgccttttgacctgcagtttcagtcatttttactctaaaagcgcgtacaccacggacatggcgacacgcagcggacgaagagtaaaggatttttcggagagtgaactgtcccagtagtttgtcccaccaccccaaaaacgcccctgaaactcaagtgaaactcaataggaacgcaagggcgtcatcgtgcgagcaccgcagcctgagccgccgataccaggctcgtttgcgacgccgtcgctgcttgcctggatcgtcaacggcaagtacgtcatgtcgctgccgctctaccgcatagagacagacctcaaggcgtgcggcgcgacgatatcgcgccaggacatggcgaactggatgatgaacgtgcacgcgcgctggctggcgaaggtccatgagagaatgaaggtcgagctgctgtcgcatgtcaggattcatgccgatgagaccacggttcaggtcctgaaagagccgaaccgcgaggcgaagaagaaatcgaggatgtggctgttctgctcggcgcgctgcaacgtgcccgtgtatgtattcgaataccacgagacccgcaggaagggcgttgcccaggagtttcttgcgggctggtccggcacgcttaccgccaacggctacaaaccctacttcaatctcggcaaccccaacatcgccaacacggcgtgcctcgtccacgtgcgccgctacttcgcccaaatcgtgaagatcgccggcggcgacgccaaggcggcgtctgcggccagcgttgcgctcgaggcaaggcgcaggatcgacgccatgttcaaggtcgactccaagttcgacgacatggagccgggcggcaggaaggccgcccgcgacgcggagctccgcccgctcatggaggacttcgggggatgggcgcgggcccagcttcccctagcctcgccgaagctggcgccgcaccgtgcgctgcagtacgctgtggagttctggccctacgtcatgaacgtgctgtatttcgtcaagtcggtgtttcgtgtttagtcatgtatttttttcgggtttaggcagttgcatgcattttccttatttttccggttgcgcggaggtgttcctgccgaacatgagggcctcactgacgcggcggctctggccggtgaactcgaggagccgcccgtggtgcacgatgcggtcgatgatcgctgcggcgagtttgtcgtccgcgaagaccgtgccccatttactgaactcgatgttcgtggtgaatatgatgctccgtctttcgtagctgcccgcgatgatctggtagagcaggcgcgccccgtcgatgtcgaagggtacgtagccgaactcgtccagtatgatcaggtcggcacggccgatgtcccggagcatcgtctcgagcgtgccgtcgcgtttggccttgcccagctggaggacgagctcggcggtctgatggaaccgcacgcccagccccatgtcgatcgccttcatgcccagcccgatcgcgagatgtgtctttccgcgcccggtcttgccgtagaacaccaggtcctgcgcgcgcgggatgaaaccgagccctaggagctcatcgagcatgtagccgtcggggagcctgacgttcgtgaagtcgtagccgtcgagacccttgacgacggggaaccgggcgcggcgcaggagcctgtcgtgcttcgcgcgttccctgttcgccagttccgtgtcgagcaggcggtggacggcgtcgacctggcggggcgtggcccagccggcgaattcgtcgatgctcgccttggagatgaacagcttgcgggccttctcgtagagcctttcgtccgtcttcgtgttcatcgcccgccttcctgcacgccgacgtccgcggtgaacgcgatgtcgtattcactcagatccggcctgtcatcgtcgtattcgatacccgccacgccctcggcgagcctggccgcgagcagtgtgacaccggcgcggtccgccccgccggtcgattcgaggatggaaagcatcgcctcgaccgcgttcgcccacccggattccctgtcaacgcgtttgagggtctgcagcgcctcgttgcgtgtctgtctgtcctgccgatccagccattcccgcaacgggtccggcaacgcgtcacgtacccggctgttgggccaggacgcgggcttgttgcacagcagcgccaactgcatggacgggtcctcgctgttcgtgctggcctggccgtacgcccgaggatgggtcgccagatgcttgcccgacgagtcgaggacctcgacctcgagcgcgcggaggcccacgatcacccctctgcccgcgttcgcccggtccgcggaataacgatgccgtccctcgagcgtgaccacgccgtaccggtcggccttcatatgccgccacgtgaccacgtcgaaacgcttcccgggcaacggcagcagcgccgcacggtcctcggagaacaggccacgttcctccgtgtccttgcggcagtgcggtttcgtggccagctccaggcaccggtccggcagcccggcgctgaagttctccaggctccatacgctcggccggggcacgaacagcttgcgccgcaccatgccgaccttggactccaccgcgcccttctcatgaccggaatacgggttgcagaacgaacaatcgaacccgtaatgcgcctggaaggcctggaacaggtgcgtcaggcgcggctcgcgctccccgtaccccttatggcccacgccggcggcgttatcgaacacgatccgctccggcacaccgcccagccactcgaacaggttgcgcaacgccaggcacgtgcactcagcgttctcgcccggcatcaactgcaccagaccgacgttcgaatacgggaaatcaagcacgaaatgatgcatccgctgcaccacgccgcgcaacagcacgtcgacctcgccgaaatcggcctgcgcctcgcctggatgccataccagatccatgaacgcctcatcacgctccgccgcgaactcacgcctgagccgcgccaccgcccgcgtcaccgtggacagggagacctccgcgccatgctcgtccctcaaccgctcccagatcctggtcgcggtatgccgctgcttgcgccagttcgcgcgatcctccgcgagccactgctcgatcacgggcagatacgggtcgatcaccgacgcgcgcggctttctcaccgacggcacggccgacagatcctccttcgcgaggtacttacgcaccgtcggctcgctgacatgtgttttccgcgcgatcgacgcgacggattccccgttccgccgcaaacgacggatagactgtacttggggcatgctgatcataatcctttccggtcctttctggcggagatacaagcaccatccagttaagaccattccgtggtcggcatgctctgcctaaacccgaaaaatcatcgtgactaaacccgcaacaactaattgaacacaaacacgtgctcgaagacgggtcacctggagctctcgaacaacgtcgccgagcaggcccagcgaatcttcgtcgtagggcgcaagaactggctcttcagcgatgcgccgcgcggcgcgcgggcgtctgcggcgatatacagcgtcaccaccacggccaaggccaacgggctcaatcccaggctttacgtcgagtggctgctgaccgagatgcccaacgccggcgagctcaccgatgaggttgtggactcgttcctgccgtggtcggatagggtgcctgagtcctgcaagctcgacccagccgctgccgagaaggccaaagagatgcctgacgacttcataattaacatcgaccccgatgcgttcgacgacgagatggcgaacaacgccgaggagggcctgtagcgacatagcggcctaaggcataccgcaacgcaaagatggaaacgtccaggacttttccatccgtatgccggaatggtcctggacgtttcctgctacgcggtcattttgacgcttacgctctaatgcctccaccgcttgtcgcgggcggggtagacgatccaggcggatgcgtagcttgcgataaggcagacaatgacgcagacgatgcttgtctggaacccgaatgagtcattgataacgccccagattacgcttgcgaagccaatgccgatgtcattggcgagcaggaacagggcgtttgcggcgccccagcgctctggcggggtgttctttaccgctacgctttgattaagtggcaggcttatgccagtggcgagaccatagaagattccggacgccaggaagacaggttccccgtacggtgcggcaagtagcataaggcagcagaggatgccgcacgcgacggctccggtcattgttttgattgcaggtacggtgtccatgaaatgctttgaaatcatgcgaatgataatcatgcttaccgcgctgatggtgtagaagagaccggcgtgggtatagccgagagtagtaccgtacagaccagcaaagaagacgccaaagccaaaagtggggcacatgatcatctgtgggatggcgccaggcaatgcgcgcggctcgaagatgttgaatgagtcacgcagggttctcttggacacctggtcgccttcaggatacttttcactgttaattgtttcggatgtagttactgtggtggggctgggtgcctgcccgtcttttgagtcgagttcgagccgggtttccattttgattcggtatgcgctggagcttggcagagtttgccatttactttcatagcgtgcgttgagggcgattacaagccctgcaaacccaaccagggcaaggccgacatagaggttcgttgagggatcggttcctactaggtaaagtgcgaaggctgggccgatgctcatggcgatagcctgtccgaggccgtggtatccaatgccttcgccgagccgttcttgcggtaagacgcttgctgcggcggtcgaggctgctgttgttgctgcgccaaagcccacgccttgcagcaaacggctgattgtgaagagggggatgccttgaacgacagcggacagtgctgttcctgctatgaggatagcgatgccggcgatgataacgagtgagcacttgccgttgtcgataacagggccgacgaacagtcgtgctaacgcggcggcaatggagaagacgagtgcaagtacgccggcaaggctcgcaccgtaaccttggcctgccaggaagacgctggttccactgttgagtccttggcccatgacgaagcaacagaaggtcagcgcgatgataagcacgaaaataagcgaccacagcttcggatggtcgtccttaccgatatttggcatgagaaccctcctttgattccaatactcgtgttctacgtctgcaaaagtgagatgtaagcgccaaaatgaccgcgccttaacaacccgctgggcttgaggcagaatcatcgcatcgacttatcctggaaactgcctgacgaaggcgacaggatgcttatcggcaaggcggcaaatcttaacgagagccaaatccaagagcttgcaaagcttcagcgaggcgttgcagcaatatatcagaacgaatggatcgaacctgtcctctgtcacatcgaaccgcatgaacgcggcctagagtactcgccgacacagagcaagcacagcgcgaaggacaaggcttcttctgaagagcttcgctatctcaactcttgtgtgcttaatccgttcaagctcgatgagccaagggaatacaacttctgcgactgtgtgcacaagatggacatacctgactccatgaaggcacgcttgattgagatggcaaggactcctctgtcctcgaggaagccactgtttgaatggtgtgcttataggtatttcaatattggacgcatcctcgacgacgccagggatttatctgccgacagcctcaaagagaggctttgctcccatctgctttcaagctggaaattcgaagatgactcctcacccgaaagctggggaccaatccaatacctgttcattcagtcgatgcttaacgctcatctcaacgagctgagaaagaggggtaccggcatcgagacaacggaaaaggcctcagcactcgccgaagtatcagcggtcttatctcaaacaaggccggtgatctaaatggcgtttgaaaatatagagcaattaatgccggatacgaccgaaacgagattggcctttgaggaggcgcaacgcaccgttgctgattgtgcagatgccgcatggcgggatatttcttccggcgatgtcctaaccgcgagcatttcaacagttcaagaagccgcagatgacgcctggaaagcatgcgagccaacactcaacgctgcaggcgaaactgtccgcgatggcgcaaggaacggagcttatcttggcggcaggttcgtacttggagttgccgacgttggagaaaacgcatatgtcggtgttgaatcgaatattgaactactggccgaagacgaagaagcagcggtgaaaaccgcgcaaacacacgctgttgacgatgcagccaacgcctggggcgacttcatggaagccgatgagcagatacgggaaatcggagactatgtcgaaactggaggcgaaatcgccactaaagttgcgcttggtgccgtagccgtcaccgcttctgcccctgcagcactcgctgctgggtctgtactcgttcttgacgaaatgggaaagagcttggaagccggcgctgaagacggtgagatatctcaggaggatatcgtcggagaagtcgttgcgggaactgttacggcagcaacgcttcttgccggacgaggtctaaataactttcttgcctcaaaggcagcagaatcgggcgcaagctcacgaattctggatgatgccggaaaggcaatttacgaaggcgaccgactgcttcccaataacgagtttgcgatcgacggcgtgaagtgtgcaaccgacgatctcgggcaactttaccgcgttggcgacgacctcgttccgaacatgagctatgagatcaatgggtataaatacgttaccgatgcaatgggtagggtcgaatcggccgaaggcttcttacaactaaagacccacgaaggtcgtttgaccatcaaggacactatccagtcaatcggaaaagggtttgaagagctttttgatcaaagaggccatctgattgccgaccgattcaatggatcaaatggccttgagaatattgtcgccatgggcggcgaggttaaccaaaaagcctatgcagcaatcgagcaaaaatgcgccgatgctttggctgacggcgctgaagtgtttttcaaggttgagccactttatgagggcgggtcattcaggcctagctcgtttgctatcacggacattattgacggcgaagagacggttacgtttcttcttaacactgcaaaggaaatgtaatgagtgaaaagaagatgctacaagggatagcttcaattcttgaggaaaccctccccgaagactggagcaaggtcgtgttttacgccgagtacgccgagggtgcgttctctattgagtattacgttgctggcagcggaaaagacgacttcgttaaatgctttgaccaaaaaggcgtttcgagggcatccttgatgaaaaactttatggctatcaacaagttcattgaacctgaaagggccgcgcttaagcccgaaaagagatggggatcgatgacgcttattctccattccaacggcaagttcaaagttgattacgactactccgacatgacagaaaacgtttacgcccgaaagaaggcctggaaaaagaaatatctcgcctagcaacgaacggtctgggaaatcaccgcaaagccacccgtgcatactcttcgagcgcacgcgtcgtcggcaacgtttcaaccagcgcgtttttgggagccatgcaaacccctgttcaacattcctcgggagtaattgctctctatgacgaatgggattccccatcggggaatcccattttttgttgccgacgacgtccggtataatttttccgtttacgacgtcgttcggaaagggatgccgacctctatgcgccagggattcgacaacgaaaaatacatcgagctgcaagccgccaacatcagaaagcgcatcgcgcaattcggcggcaaactctatctggaattcggaggcaagctcttcgacgactaccacgcctcgcgcgtgctgcccggctttgagccggacaccaagttccgcatgttggaaagtctggtggacgatgtggaaatcgtcatcgccatcaacgccaaccatatcgaaaaaggcaagacccgcggcgacctcggtatcccctacgacgaggacgtgctgcgactcatcgacgtgttccgttcccgcggcttcctcgtcggctccgtagtgctcacccaatacgccaatcagcccgccgccgacgcctaccgccaccgcctcgagcaactcggcgtcacctgccgcctgcactacccgatcgccggatacccgcacgacatcgaacgcatcgtttcagacgacggatacggcaagaacgagtacatcgagaccacccggccgctcgtcgtggtcaccgcgcccggccctggctccggcaaactcgccacgtgcctgagccagctctaccacgagcaccagcgcggcatcgacgccggctatgccaaatacgagacgttccccatctggaatcttccgctcaaccatccggtcaacatcgcgtacgaggctgccaccgtcgacctcgacgatgccaatatcatcgacccgttccatctggaggcgtacggcgagaccaccgtcaactacaaccgcgacgtcgaagcattccccgtgctcaaagccatgatggagcgcatcatgggcgaaagcccctatcagagccccaccgatatgggcgtcaacatggccggatacgccattgtggacgacgatgcctgccgcgatgccgcgcgtctggaaatcgtgcgccgctacttcgccgccgccgtgcacttgaagcgcaccggcactggcgaggaacaggtggagcggctgcgctccatcatgaaccgggccggcgtgacccccgatctttctcccgcccgcgccgtggcccttgagaaggaagccgccaccggtgccccggctggtgccatggtgctgcccgatggccatgtggtcaccggcaaaaccggcgacctgttgggcgcggccagcgcgctgctgatgcacgcgctcaaggccgtcaccggtgttgacgaaaccattccggtaatcgacgatgccgccatcgaacccatctgtcggctgaaaaccgagcatctcaacagcgtgaaccgacgcttgcactcggatgagacgctgattgcattgtcaatcaccagcgccaccagtcctgtggccgctcgcgtcatcgacgggctcaaacagttgcggggctgcgacgccttcttctccgttatcatctcatccacggacgaggcgctgtatcgcaaactcggcatcaacgtgtgctgcgaaccgaagtacgaacgggtgagtctgtatcaccggtaagcgccaccgataagcgcggtatgccgcgaatcgtcaagccggtaatcatgcagcatgcggcctgacaattcgctgctgtcgcattgtctctcccctcggccatgctgggcttgttttccgtttgttggagagaacggggaatgccatcagcactacggaaagagaaggattatccgtgaagcggttcgtgggtttagacggtattaaaggactagcgctgatagccattgtgctgtaccactgcatgcagcaacggctgccaggcggattctacggagtcgacgtgttcttcaccgtctctggattcctgattgccgtcagtttgattcgttctctggcgaaaaccggatcgctgaatctcgtgcgatatattcccaagcgtgcagcacgtctctatccggcgctgtttctgctgattccggtcatcgtctccgtcggctggctgttcgatcacgacattctagtttccatccgcgaccaagtcatcaccgtgctgctgggctgctacaactggtacgccattgccggaggccaaagctatttcgaccaaatgaacccgcaggtgtttcgccatctgtggttcattggcgtgctcatgcagttctacgtcatcgtgccgttcatcgtctggctgatgtggaagctccgccagacgaaactgtcttcactcatcccactgggactcgcggcgttcagcagtatcgccatgtgggtgatgtatgtgcccaaaggcgaccccacccgcgtctacttcggcaccgatacccacagcatgggcctgatgctgggtgtggctctcgcctggtgggtcaccgctcctcagttgggccacgctcgccagagggctgtgccgatgccccgcaccattagctcgagcgcttcggcagccgcacatcgggctccgttacctcagattcccgtggagcatcgcatctggaatgcggcggcaccggtattggcgttcctcagcctgattgccttggtcaccatggcggttatcggcaaacaggatgcattcgccttccgcggtggcatcatattgtccagcttgttgtccgtgctgctgattgccggtaccatctccgacgattcctggatgcaaagcctcatggtgttcaagccattggcctccctcggcaagtattcgtacggcatctacctgtggcactggccgttgtggattctttccagcgcccttgccccgaagatcttcaaggcagtagggccttggcctctcatcatgaccgcgttgctcaccgccattgcggtgatgatttcctggctgatggtggagaaaccggcggcaacgcactcggcggtatccgtcgtggtgccccttcgcacgaacaagaagaatcatgtggcccgggttattgccgttgacgttatcctggtgctgtcgttggccggctgcgtgcagggcattgctcatgcacctgcgaaaaccgccatgcagatccagctggagcaacaggccgcacaactggaacgtatgcagaaaaccgaacacgtgctgctgcgccatgccgtgccggcaccgcccaagcccaagcatgagatgcccaccggcgatcagattaccgccataggcgattcggtgatgctggcctcatcacagggcctttcggaagtcttccccggcattcagaccgacgcgagcgtttcccgctccatcatggtcgcccccgaactcatcggcaacgctctgtccgccggcagtctgcggcagtgggtgttgatcggccttggcaccaattcggcaatcacccccgatcagttggaccagattcgtaatatgatcggccccgaccgcgtgctggtactggtcaatgcccacggagaccgtacgtggattccacctaccaaccaggtgcttgccgactatgcggccgcacatccggacaatgtggtgctggtggattgggatgccacagccaacgcgaacgcgcaggtgctcggctccgacggcatccacccgagcatggatagcgatatctatgcaaaggcggtcagacagaccatcgaacaatggatcgcaagcggcaggtgaacggcaggcaacgctgagttgtccaaccggtcgtgaagaacggctatgctgaagactgcatcaacgagaccacacgttgggagacatggtgagcgcaatccttgaaggaaagcccgataagaatcttattctcgttacgggaaggattcatccgaagttggctgaggatgtcgccgagcagctcggcatcgacgtccttgaaaccaccgcatacgatttcgccaacggcgagatgtacgtgcgctacactgaatcggtgcgtggcgccgatgtgttcgtgctgcaaagccactacaagcccatcaacaaggcgatcatggagcagctcatcatgatcgacgcattgaagcgcgcctcggcccgttccattactgcggtctgcccgttgctcggctactcccgtcaggacaagaagcaccgcggccgcgagcccatctcctgccgtctggtgttcgacctgctgaagaccgccggtgccgaccgcatcatgtcggtcgatctgcatgccgcgcagtcccaaggcttcttcgacggcccggtcgatcatctggtggccatgccagtgctggtcgactacatccgtgatcgtttccagggccatctcgacaacgtcgccgtcgtctcccccgacgccggccgcattcgcgtggccgagcagtgggcgcagcgtctcggcggcggtccgctcgctttcgtgcacaagacgcgcgacatcacccgcccgaaccaggcggtcgccaaccgtgtggtcggcgacgtcgccggcaaggactgcgtgcttgtcgatgacctgatcgacaccgccggtaccatcgcgggcgcatgccacgtgctgcaggacgcgggagccaagtcggtgaccgtggtcgccacgcatggcgtgctctccggcccggccgtcgagcgactcaagaactgcggtgcgcgcgaggtcgtgctgaccgacaccgtgccgattcccgaggaaaagcgctgggatggcttgaccgtcctgtcgatcgccccgctgctggccagcgccatccgcgccgtattcgaggacggctcggtcgccgaactgttcgacacctaccccgagcaccacggtcaaggcttcctgttcgcctgatcacgtgcgtgtttgttcgtggaaagcacacgatgcgagacgcgacatggcgtagtctttcggtaaataccgacaatatggtataaatgaacacttgtgggccgaaagcccacgactcccccatggtgtaatggcagcacacgggtctttggaaccctttgtcttggttcgagtccaggtgggggaacggctgacggccgctcgacatccgggcggccgtctattgttttgaggtgtttccaccctcaatagacattccgatcgaagggaatacgtcagttatggcattatccgcagccatcgtcctcgcagccggcgagggtacccgcatgcgttccaacaagccgaaggtgctgcatgcttttgcaggcaagaccttcctgaacagggtcatggattcggtggccgccctgaatcccgacacgctggccgtggtcgtgcacttccaggccgagcgcgtcgccgaagccgcccgctcctatgacgagcaggtcaccattgtgaaccaggacgacattcccggtaccggccgcgccgtgcagtgcgcaatggcgcagctcaccgaggctggcaaggtcgatggcccggtgctgatcgccgcctccgacatgccgctgctcgacagcgagacgctgcaccgtctggtcgaattccacaccgcctccggcaacggcgccactgtgctcaccaccatcctcgatgacccgaccggctacggccgcatcatccgcgatcgcgaaggcaacgtgctgcgcatcgtcgagcagaaagacgccaaccgcagcgaactcgccgtgcaggaagtgaacacctcagtctacgtgttcgaggcttccgtgcttaccgaggcaatcgccggactgaagtcgaacaacgcgcagggtgagttctatctgaccgacgcgctggaaaccgccaaggccgctggcaaggtcggcgcgttcgccgctccggatccgctcaccgtcgaaggcgtgaacgaccgcgtgcagctggccgcgctgtccaagacctacaaccgccgcgtctgcgagcgctggatgcgcgacggcgtgaccattcttgacccggaaaccacctggatcgaggacgatgtccaaatcggccgcgacgccaccatcctgcccggctccttcctgcaaggccacacggtggtcggcgaggacgccatcgtcggcccgtacaccaccctgatcgacgcaaccgtggacgaaggtgccgtggtcgagcgttcccgcgtacaggaatcgcacatcggcgcacgcacgaacatcggcccgtggacctacctgcgcccgggcaacgagttcggcgaggatgccaaggccggcgcgttcgtcgaaatgaagaaggcgcacatcggcaacggcaccaaggtgccgcacctgagctacgtgggcgacgcccagcttggcgaccacaccaacatcggcggcggcaccattaccgccaactatgacggcgtgcacaagaaccgcaccaccatcggctccggctgccacgtgggtgccggcaacctgttcgtggccccggttgaagtgggcgacaacgtgaccaccggcgccggttccgtggtgcgccacgccgtgccgagcgacacgatggtctactccgagaatacgcaacacaacgtcgagggctggaagcccgcctgggagcgctgaaccatgcccgcacttcaggattccatcaacgccgtccgcgtggccgccgaggccgcggaccgtatcaaagccaccgacatcgtggccttcgacgtagccgacctgctcggcatcaccgacatcatgatgatcgccggcgcctccaacgagcgtcaggtactggccgtggccgaggaaatcgaaaaggacctgttccttaagtgctccggccgtcagccgcgctctcgcgagggcctgaccgagggccagtgggtgctgcttgactacggtgatttcgtgattcatgtcatgcacgaggaatcgcgcgaattctacgggctcgaacgactctggcgcgactgcccggccatcgatcttgaactcgcacacccggaaacggcggagcatgcggaagatgctgccgtcaccaccgcgtaacgtgcgaatcacataacgctgatattcgcgtgtcgggctgcctgttgccaaacatcattgacggcatcaggcagccctccccttttttcctgtttcctcactggaaccgaaaggatcgtcactatgaccaatcatgttcgttccgttttccttatccgtcatggacgcacctcctacaacgccgctcacaagctccaaggccaggtcgacattccgctggacgccgtgggtgaatggcaggtcaagcagaccgccgcggccttgaaaaggctgtacgtcgatcgtcggcaggaaatcaaccaccggttcattgtctgctccgatttgaagcgtgcgcacgccaccgcgcaagctttcgccgacgtattgggtggaatcgagcccgtcgatgatcgtcgcgtccgtgaacgcagcttcggtgattgggatggccatgccgtggccgaactggccgaacgctaccccgaggacttccgttcctggatggagtctcggggcggcgagctgaagtatggtgccgagcccaaggaagctgtgggcaagcgcggcgtagaggctcttgaggactggtccacgcgtgccggagacgacacggacctgttcgtgttctcgcacggcgcatggattgcgcagacattgcagaccctgttgggcatttctgcaatcgatccgaccttttccacggtggtttcattgcgtaatgcgcactgggtgcgcttggtgccgatggacaatcccgatggcactgtgcgctggcgtctgctggactacaatcacggtccggccatcgccgacaccgacgagtgggaacgcgaacgctgatcgtgtcacggctcccctgctgagccaacaggttcagtgtattcgaaaaaccgttcaagcagtaattgaataacccaatgcctgaataatggcggaaacaagccaaaaagtgtcgccaaatcccacttttgccatttggcgacacgccggcttttgccagaatcgacatctcgtcgtaatgtatacgaggtccaaacaacgggccaacaattgaaaacggggctatagcgcagctggtagcgcatctccatggcatggagagggtcgggggttcgaatccccctagctccacgacgaagccatcaaatcaggcgatatggtggtttctccgctggttcatggcgggtcttgcgactcccatgaatcggatagcttcactcggggctatagcgcagctggtagcgcatctccatggcatggagagggtcgggggttcgaatccccctagctccacaatcaaggccggtgcttcatgcaccggcctttttcgttttctggcctatcggccgacttttggggttttgcgcaacattccccggaaagcgtcgccaaggggacgctcttccgattggcgcgacaccggcgtgagcgataacagtaatcgccactacaatgaggtgtggtccctatcgtgttgattatcaaaggagacaaaaacatcgtgaccgtcacccgtgtatatatcgccagccctgaaggcgccaatggccgcaacgtcgtcgcttacggcatgctcaacgcattgacttccaagtacaagaccatggtgttccgccctgctgtgtccaaccatgacgaattcaccccgatcctgctcgccgcctccaatgccggactcggcgtggccctgtccaccggcctcgatgtgcacaaggtgcgcgaggataaggacaccgcccgtggcgatatcgtcggcgcgttcaacgatgccatggacgtttcccgcgcggacgccgccctgatcgtgggcaccgacaagtcccacgtcaacgatccgaccagctatgaattcgacgcgaatgtcgccgctgatctgaaggccggcgtgttcctagccgtgtgcaccatcgaccgttggccgcacgagctcgacgagaccgtcaagctgtccatcgagggcatggaggccgctggcaacaaggtgctcggcatcttcgtgaccggatgcgagccgcgccacgctttctccgttaaggagaccctcgccaagtacggcctgccggtctggactctgccgcaggtgccgttcaccgatgaatccaccaaggatctggcgctggagaccttccgtaagaacgctcccaccgatgaagtgctcgccgcgctcgatgtggacgtcaccgcgcccatcaccccgtacgccttccagttcggcctgctcggcaaggccaagagcaacaagaagaccatcgtgctgcccgaaggcgaggaggaccgcatcatcaaggcggccgactacctgcttgagcgcgagatcgtgaacctcatcatcgtgggcaacaaggacgccattctggctcgcggcaaggaactgggcctgaactacttggagcgcgcccgcttccaggctatggacgacgagaacgtgttgaagcccatggtcgccaagctgtgcgagttgcgtgccaagaagggcatgaccgaggagcaggcccgcaagcagctggccgacgccagctacttcggcaccatgctcgtggtgctcggctacgccgacggcctggtctccggctccgtgaactccaccgccaacaccgtgcgcccggccctgcaggtcatcaagaccaagcccggccagaagctggtctccggcgcatttctcatgtgcttcaaggaccatgtggccgtgttctccgactgcgccatcaacctcaacccggatgccgagcagctttccgaaatcgcgttgcagtccgccgagaccgcacgtgccttcggcatcgacccgaaggtcggtatgctctcctactccaccctcggctccggcaagggaccggacgtggacatggtcgaggaagccaccaagctgctcaaggagaaggctccggatctgccggtggtcggttccatccagttcgacgccgcctggtcccccaccgtggccgccaccaaggccaagggcaacgatgtggccggacacgtcaacgtgttcgtcttcccggacctgtgcgccggcaacatcggctacaaagccgtgcagcgctcctccggcgccttggccatcggcccggtgctgcagggtctcaacaagccggtaaacgacctgtcccgtggtgctctggtgcaggacatcatcaacaccatcgccctcaccgccatcgaagcacagtgagcccggcttagctcccggtggctcccgccagcgggagccaccgtaatgcttattttgtagcaagcaacgagtaatctaatcaacggtaacccgtgtctcacgggaacattcaatcacaatggaggatgcccacaatggcgaaaaccgtccttgtcatcaattccggctccagctcgatcaagtaccagctggttgatctcgaatccggcgaaggcctcgcttccggcctcgtcgagaagatcggtgagccggtcgacggccactacaagcacgagtacaacggcgaaaagcacgagcttgaagagccgattcacgaccacgagcagggtctgaagcgcgtgctcggcttcttcgaggagtacggcccgaacctgtctgaggctggcattgtcgccgtcggccaccgtgtggtgcagggtggctccatcttcccgaagccggccctcgtgaccaacaagaccatcaaccaggtcaaggatctggctgtgctcgccccgctgcacaacggcccggaggccaagggcgccgaagtcatgcgctccctgctgccggacgttccgcagatcttcgtcttcgattcctccttcttcttccagctgccgaaggccgccagcacctacgcgctgaacaaggaaatcgccgatcagtaccacatccgccgctacggcgcccacggcacctcccacgagtacatctcctccgtggtgccggacgtcgtcggcaagccggctgaaggcctgaagcagatcgttttgcacatcggcaacggcgcttccgcttccgctgaggtctccggcaagccggttgagacctccatgggtctgaccccgcttgagggcctgatgatgggtggccgtaccggtgacatcgacccggctgtggtcttccacctgattcgcaacgcccacatgaacgtggacgagcttgacgccctgttcaacaagcgttccggcatgatgggcatgaccggctatggcgatttgcgtgaggttcaccgtctggtgtccgagggcaatgaggacgccaagctggctctggatgtctacgtgcaccgcatcgtcagctacatcggcaactacacctaccagatgggtggctgcgacgtgatcaccttcaccgctggcgtgggcgagaacgacgacgtggtccgcaagatggtgtgcgacaagctcgctccgttcggcgtcaagctggacgaggagaagaacgccacccgctccaaggaaccgcgcatcatctccactccggactcctccgtgatcatcgccgtgatcccgacgaacgaagagctggccatcgcccgcaagtccgccgcaatcgccgaagccggcaccgacacctacggcaacaccttcgccaagtaagtaaccgccgttaggcatctcaccaatctctagttgcaacactatgggggctgattccgattggaatcagcccccattcgtatatggtcatgagaccactacccccgcgtcatactcccctcagtcgcctccggtggacagatccactcagagaggggatccaggccctataacttggctcccttctctgaggggagctgtccgcgtagcggactgaggggagttccaccagaacacaggaccccttactgcctcagcatgccactccacataccgacgaaatcaggcaaggtcttgcgcgtggtggccacgttgatgacctcgatatcgggaatacgcagccccagcatcgcggcgaacgtggccatacggtgatcagcataggtttccatcacggcaccgtgcaacgtctccgccggcaccggttcgatacgcaatccatcaggcaattcctcagccgctcccccaacacgacgaatctcgttgaccaatgcctccagacgattcgtttcgtggccgcgcaggtgaccaataccaaccatgtctgtcgatttatcagcaaacaccagaatcgccgccaacgagggcgcaatctccccggccgccgtcaaatcgaacgtacccagcccacgcacggtgccgtcaccggtcacctcgcaatagcgcacgccgccgatggtcgggaacgatacttcggcacccatctgctccagatatccgggcaacaggccgcccggctgggtggtggtttcaggccaatgaggcacccggaccgtgccgccggcgatcaatgccgcgccgaggaatggcgccgcgttcgacagatcgggctcaacggtcaccttgctcgacagttgcattgcgcgcggttcaaccgtccatgtgcgggcggattcgtcggcctcaaccgcaccgccggcaccggtcacatcggccacggtcatgcgaatgtgcggcaggctcggggtcttctcccccgtgtgcgcgaggtgcagaccgccaggcagtttggaactaatcagcaacaggccggagatgaactgggaagaaccggacgaatcgatgctgacctgcgcctgggcagccggcaaggttgcaggcggcgtaatagtgaacggcagacggccaacctcgccgtggtaatcaaccgttgcacccagctgttccaaaccgtcaagcaccggcttcatcggacgtgcataagcctgttcgtcgccatcaaaattcactgggccatctgcaaacagggcaaggccgggcacgaaacgcatcaccgtgccggccagtccgcagaacacattgacgttgccatggaatcggccagatacaggaggagtaaccgttacggtggtgtcggttgcggaatccacgtcgcagcggacaccgagggcttcgagtgcgcccatcataaggtccgtgtcgcgcgaacgcagcaggccaatcagagtaacgggcttgctgccgagggcggcgagaatcaggtagcggttggatagggacttgctgcccggcaccgttaccgtagcgttcaacggctgtgcggcgagcggggcaggccagagattcgtgagtcgttcagtcataaggccaaatctatcaaacaaattattcaccggtcggcagcgatgcgggattcgatctgctgatcaggtgcggaagacggctgctcaaaaccgccttcgatggcctgcgcgtgcaacaactgagcggccgcgcgatcggcctcgatggcggcgatctggcgcgagaacacgatgaaccagccgaggaacgccagaccagccaacgcctccacattggtgagggtgttgtgacccatcatcatattgacccagaatgcagcgcatacgagcgcggtcaggtcggaggccaccatcactgctttggacaggcgtggcgcaagccacggcaggagcacgaacagcagcagcatgacgaacggcaggcctttggcgcatatattgtgcaagagattgtgtggcgtgtaccgaaacacgccgatgccgatgaatgccaggccggccaccatcagcaggaaggacagaatggagatgcgcagcatgaaatgtgggatttcgtagccgcgattcggatctctgttggtgcggtcgtgccagaggcgctgtagccgttcggtggtcaccagttcggagatggcgaagtagctgacgatgatgatgcatgtgccggcaagaatcagcgtggagttgaacatacgggccgcaaacgtggttctgtcgccgagctgcgaaaagttgttgtgataccagtatgggtcgtcggtggtcatgccggcggtgaccacgccggagatgacgaagaacggcaacagactggcaatagttttggcgttcatcatctccgcctgtacaaaggtcatgtaccccaccacgccggcgaaggcggcgcagacgctggagatatagccggagaagatggcattgcccatcatgtcgttggccgcaccgatgagtgcaaaagacgacaggaaaatggtcgaggcatacaccaccgaaagggcgacgatttcgaaaatgcgacgaatcggtgcaaaccaaccatgtttgaggttcaatgaacgtgatttgcgcgcatagccaataatgaaggaaatgacgccgcatgccgccacgatgcccgaacataccatgaatcggcgttgcgtcagctgccagatggccggcgcgtattccatgtacaggttcatcgataccgcgccaacgacggcgcaaatcaagaaggagatgagtccggaggtttctgcacgctgatgacgtcccatgccgggcctcccctatctattcgatgccgcgttatctttcaacaacaaacaaaactccccccgaggacaacgctttactagcaagccagcgggatttggctgtcgccattctactgaaaatctgaaacactacaaaaaaacgattatgtacgggcttcttagcctttgcgactatcgttaccgccttgccgagtaccgttgttcatgcagaaagaaagcagtattggacacaatcgaatgagcgtgtcagtatcgttgaaaaagtaatgaatgacggttctatcggttcaacctttaagggacgaaccagccgcggtaccatggcgctgatgcatgactatgccgagctcatcaatgaattacgtccgacagcagagcaattcaccgagatcgagcaatactgggtcaaacgaattcaggcgttcttcaccagcaaaccattcaagctggagtccgacaactcgctttccgttgatgcggccgtggaacatctgctgcggcaggcagcgcagcggcgaagggagaatccgggcaccatgtacgtcggcaccgtcctgcagcatctcgtcgcggcaaagctcaccatcgttgctccggaagtggaaatcaacggcgcgtccgttgctgatgatccgagtccgcggcttccaacggtgaggccgcggaccgtctcacaaaaccgtccgcggctccgccctcctgtttcgtcgcaactgactacaccgacgggttcgggcgcttcgtcacgaaaacgccattgcgatgcaccgtatacgcgccgccgtcactgccccgttccgcccggaacaggacgatcggctcccctgcgatgtcgcgcagttcgacatccgatctgccacgtgtcagatagaagtcgaatatggcgtcgtcggattgacgcacggtgtgcagaacgtcagaggtcacgccgctggcgggcgaccgcaggttggcttccggctgccggccatcctgcggctgcgcggcaagccagcctcccacgaatcgcgtcagatcgctcacgcccagatcgcagccgaggaaatacgcctccccttcgccgtacgtgttgcgggtgatcgcggccatgccgtcaagctcccactcatccgcttcttcgccggcatacgaggcaagcacctgcacatgcggtccggcgacggtcacgtcaccgagcttgtcgatgacgcgatcgagccagtcgaaatcccaatggtcttcgatgggctggaggcgatctcagctgaagatggcaagggccacggtgttgacgccggcctggcccatcaggcggatgtcgtcatcccagatttcctccggccattggtcgggactatagtcgccaccgaaagcgatgccgcgtccgtccgcggtcagcagttttggccatacgaagtcacgtcatgcacgcacggttatctcctttggcaggcggcgcagggccacggcccatatcggataccagctgatagacactcctggccgatagtcgacacgccgccggttccggccccactgccggaaccgacatgggtatgttcatgaccgccgaccgcaggaacgaacaggcccgtccgccacggaccgcatcttgcggttcaggcggacgggccttatgggagggatgggaacgggagatcagttcttaataactgcctgcgcctcatcgtcgacgatctcgccggaagcgagcttggcttcgagctcctcaacgatctgcgcatgcatcttctcatcgatcttgaccttgaaccagaacacgacgaggctgaggatgatgagaacaagcgggacgtagaaggcgaaggtcttgaacgtggcgatgttggacgcggtcatgtcggctgccgtggcatgaccggtcatgccagccgcgagggcaacggcaccgaccgcaccgttggacatcgcgccgccgatcttgtcgagcatgggacgcaccgacaaggtgaccgcctcgttgcgcctgccgttcttcagctggccgtactcgatggagtcggtcagcgacagaatcgcggtcatctggatgaactgcgcaggcacatagaagaagatcagggcgacgatgacgaccggcaggttgctggagaacagggcgagcatcgtgtagccgatgatcatggagaccatgccgccggtgaacaggtagcgacggggaatccagcggttgagaatcgggtacagcggcgccatgatgaatccggcgatcagcgggatgatgccggtgatggagaaggcggcaggctcgtcaagcacgaacacgaagaggtagtacatcacaccggtcgtgatgacgtttgcgatggcgtacagcaggtaggacagggcgacccacagcagctggtcgttctggaacagcgccttgaacgcctcgaacgggttgccgttcttctgggccttggcacgcagcgcgctggtgctttccttggtgccaaaggcgacggtccaggcggtaatcaggccgaggagcgcgacgatgaagccgaaggaggtccatccggcctggccctggcccttggcgccggtgaacgtccaggtgaagtagctgacgatcgggatgacgatgacggtgatgccgttgtagccgatagagccggtgaaggtgccaagggcggtgtaggtggaacgttcgtgggagtcggaggacaacgccgggatcatgccccagtaggagatgtcacgcagggagtagaacacgtcaagcacgatgaacgtgatgatgaacagcacgatgaacagcgtggtgttcacgttgaccagtccgaacatgccggagaagatgagcacgatcaacacggaggagaccagtccgccgatgaactgccacgggcggaaacggccccacttggtggtggtgttatccacgaggttgcccagcagcggatcgatgaagatctcggcgatgcggataacgacgatcaggccggtgatgacggcgatcatttgggcggcgagagccttgctgtagctgacgaacaggcagctggtgacgtacgtgacgaagtacgtgctcatcgcgttgtagaaggcagcctgccccaagttgccgcacgcgtaggcgatgcgctggcctaacccgcccttcctgcggacgtcaccgtccgcgacattttcgttgctcattaatcttctccttaagaacccagagcatggaatcactcattgattttgtaaagtaagcatacaagttttatcaccgtaagcatacaagttttatcaccgtgagcatacaagttttatcaccgtaagcatacaagttttatcactgaaagtaaaaagcattagtaaacaaggagataaacagcgtgtcgcaaggatgggataacatgagctgaaccgagacattgcatggacgcggcgtagcgtcgacggcaagcagtgccagtgatttggaagcggtaaacaggatttgcgttttatataaaaactgtttatccttttcggtaaaggaggccccggcctcttccataatatcattcacaacgaggtaatgacagaaagcaggagagcatgacagacgtcacacatgtcgatcgcgcatcgcaggcttggctgaccgacccgacggtgttcgaggtgaaccggactccggcccattccagccacaagtggtacgcccgcgacccccagagcggacaatggtccgatctcaagcagagccttgacggcgagtggcgggtcgaggtcgttcaggccgccgacatcaacctcgaagaggaacccgcgacggccgagtcgttcgacgactcctcgttcgagcgtatccaggttccgggccacctgcagacggccggtctgatgaaccacaagtacgtgaacgtccagtatccgtgggacggccacgagaacccgttggaaccgaacatcccggagaacaatcacgtcgcgctctaccgcaggaagttcaccgtctccgcccccgtggcaaacgccaagcaggccggcggatcggtgtcgatcgtgttccacggcatggccacggcgatctacgtgtgggtcaacggcgcgttcgtcggctatggcgaggacggcttcacgcccaatgagttcgacatcaccgaactgctgcacgacggggagaacgtcgtggccgtcgcctgctacgaatactccagcgcctcctggcttgaggatcaggacttctggcgtctgcacggcctgttccgctccgtcgaactcgccgcccgcccgcatgtgcacatcgagaacacgcagatcgaagccgattgggatcccgaggccggcaccgcctccctcgatgccgcgctgaccgtgctcaacgcggccgacgcggccacggtccgcgcgaccctgaaggacgccgacggcaacacggtgtggcagacgacgggcgacgcggaggcgcagaccgcgatctccagcgggccgctgcagggcatcgccccttggagcgccgaaagcccgacgctgtacgagcttgacgtcgacgtcattgaccaggcgggcgacgtcatcgaatgcacgtcccagaaggtcggtttccgccgcttccgcatcgaggacggcatcctgaccatcaacggcaagcgcatcgtgttcaagggcgccgaccgccacgagttcgacgccgaacggggccgcgccatcaccgagcaggacatgatcgatgacgtggtcttctgcaagcgccacaacatcaactccatccgcacctcgcactacccgaaccaggaacgctggtacgaactgtgcgacgagtacggcatctacctgatcgacgaagccaacctcgaagcccacggcagctggtccctgcccggagacgtcctcaccgaggacaccatcgtgccgggtagcaagcgcgaatgggaaggcgcctgcgtcgaccgcgtcaacagcatgatgcgtcgcgactacaaccacccgagcgtgctgatctggtcactgggcaacgaatcctacgtgggcgacgtgttccgcgccatgtacaagcacgtgcacgacatcgacccgaaccgtccggtgcactacgagggcgtgacccacaaccgtgactacgatgacgtcaccgacatcgagacccgtatgtactcgcatgccgacgagatcgagaagtacctgaaggacgacccgaagaagccgtacctctcctgcgaatacatgcacgccatgggcaactccgtgggcaacatggacgaatacacggcgctcgaacgctacccgaagtatcagggcggcttcatctgggacttcatcgaccaggccatctacgccacccagcccgacggcaccaggagcctgcgctacggcggagacttcggcgaccgtccgtccgactacgagttctccggcgacggcctgctgttcgccgaccgcaagccttcccccaaggcccaggaagtcaagcagctgtactcgaacgtccacatcgacgtgacgaaggactcggtgtccgtcaagaacgacaacctgttcaccgccaccggcgactacgtgttcgtcctgagcgttctcgccgacggcaagccggtctggcagtccacccggcgtttcgacgtgcccgccggtgagacccgcacgttcgatgtcgcatggccggtggcggcgtaccgcgccgacgcccgcgaactggtgctgcaggtttcgcagcgtctcgccaaggcgaccgattgggccgaaagcggctacgagctcgccttcggacagaccgtggtgcccgcggacgccaccgcgacgcccgacacgaagccggccgatgggaccatcaccgtgggccgttggaacgccggcgtgcgaggcgccggacgcgaggtcctgctgtcgcgcacccagggcggcatggtctcctataccttcgccggcaacgagttcgtgctgcgccgtcccgcaatcaccaccttccgtccgctgaccgacaacgatcgcggcgccggtcacggtttcgagcgcgtccagtggctgggcgccggccgctacgcccgctgcgtggacaacgtgctcgagcagatcgacgacagcacgctcaagggcacgtacacgtatgagctcgccaccgcgcagcgcaccaaggtgaccgtctcctacacggcccacaccgatggccgcgtgaacctgcacgtcgaataccctggagagcagggtgacctgcccaccatcccggcgttcggcatcgaatggacgctgcctgtgcagtacacgaacctgaggttcttcggcaccggcccggcggagacgtacctggaccgcaaacacgccaagctcggcgtgtggagcaccaacgctttcgcggatcatgcgccgtacctcatgccgcaggagacgggcaaccatgaggatgtgcgttgggccgagattaccgacgatcacggccacggcatgcgcgtcagccgcgccgatggtgccgcgccgttcgcggtaagcctgttgccgtactccagcttcatgcttgaggaggctcagcaccaggacgagctgccgaagccgaagcacatgttcctgcgcgtccttgccgcacagatgggcgttggcggcgatgattcctggatgtcgccggtgcacccccagtaccatatcccggcggacaagccgatcagcctcgatgtcgacctcgagctgatctgatcagaattgatccgatagtccaccgtgcaaacgatgtggcccccgacttcctcgcaggaagtcgggggccacatcgtttgcacggtccttgttagtccagcggatgcgccggatatcgatgcagatccaaacctagtcgttgtagagcatcaatgaataaagatgtcactcataagctatcaagagaatccagaaccttttgaattcacatgctcgacacgcaatgtatccagcgtcgtttacaatgattcattgtgccttaatggcgcatcgggctatagcgcagtttggtagcgcgcctgctttgggagcaggatgtcgtgggttcaaatcccgctagcccgacaaacaaaaaagcctggaatctcaacgattctgggcttcttcttttatccgaccgctaaacgatttatccggttttatccgatgaccgtagaacctatatggccttgcggtataagggacttttgtgatgttgggaccccaacctgctagtcagttcgattccatgcgacatcgatttccgcttcccaatctcaaatgacaccaaaatacctgcaaccgattgtgcaatcccgtgggcgggagtgggttgcaggtaaaaggtgtcgagttacagcccagaatcacccctaactagtaccgaaatacccgcaaccgcagtaactaacccctttatacctgcaatccggcaaatatggttcagacaatccgcacatccagaccgctatccgaacacaccgtttatactagatcacacatcgaatcaacatctagaaccgaccgtctccaacgacccatagggagagcacatggacgatataagaccacgctgcggctggtgcaatctcagcaatcccgtctatgttgcctatcacgatgccgaatgggcggttccgtcgcatgatgaccaccacctctttgagatgctggtgctcgagaccttccaagccggactgtcatgggagacgatactgaacaaacgcaagcgtttccgtcaggcgttcgatgggttcgacatcgaacggatccggcgctatgacgagaacaagatcgccgaactcatgaacgatccgggcatcatccgcaaccgtcgcaaaatcgtcgcgacggtcggtaatgccaacgcattccgggatatccagacgtcgtacggcagtttcgacgactatatttggcggttcaccggccgtcacgtcatctacgagacaggcatgactacatcccctctgtccgacgccatcgcagtggatctcaagacgtacggcatgcgattcatcggcaccaccatcgtctacgcctatctgcaatccatcggcgtcatcaatgcacatgagcctggatgcttcctgcacagggaaaggtgacccgcgcaaggatttataaggtcgctcgggcagaatctctccgagaggaacccgtgcttctagttattttgcttatcgagttcttggtagcgctctttgaccccggtaaggattccggcagattgttcacgctactgcgcggtgagcgcttcgagcagttcgccgaaagtcaacccaccttcactaccggatgacggataatggttttgagattttccggtttggctcggcgcgggtcggataggtagatctcgtgatggcggcgggcgtcggagaagtcgagcccgtagccttgcgaacgcgcgtagccgtccagaatcgtcacggttgcgggctcgtcgtcgtacgggcctttgtgcatgacctgcgcgaccacgccttcatcgaagtcgaagagatatgcacgattgatgtcgacttcgggatgcttggaggcaaacgatgccttggcccacgcaaagacctcatcggtcacgaattccggcagacgaatcatcgaagtccaatagaagtcggttttacgcgtgtaatcgacgccgggcacacccttctccatgctccataagccctccagcggaggcacggtgtagtcgaagtacccgtcaatgtgctcgtccggattatttgacttcttgttcattttgatggtgaacgaaatgccgtacagcagttgcatcgccttggcgtagtcgccgccttcttcgttcggatctcctacaccgtccaccgcgacgaaccgcatcgccggcaccgtgacgatggcgggcatcctcttcggctgatacaggtccttatattcctttttatagtcgaatgccatcgctcatttcccctccgccaccgcatcgatctcatcctgacgccgccaccgcttgaggtttggcaacagcgccgacatgcagtcctcggcctgttcgacgctgatatggcaggattccgccatcatcggcgcacacgcggcgaccaattcatcgctattggcataggcctgaagaaaaacgccgtcttcatagcagtagttgcaataatctccgtttcgcgttccatccggttcggtgccgtgatcttccgggcggtaaaacggcatggcacaactttggcaaaaaccattgtccggcatttccataagcctcgccatcggcacctcaaaacgggtgctgataagccgaatcatgtcgatgctcggctctgccgttcccttctcccagcgggaaagcgcctgttgggtgacgaacagctcgtgcgcgaactgcgactgcgtaagacctcgctcctcgcgcacgactttgataacctgaccgatcgacatgactacctcccgacatcggaaaacgattcgcgcgtctcgctgtgcgcttgctgattccagtctaagggcatgtcccgttcgccaagcgcgggtacaacaaaccgttgttcgcgcttgtatcccggaggaagaaacagctcggtcgaacctatttcctctccaccccttcaattctcccggttcctctgactcctttgcgagcgccgcggatgggatgagcacgcttacgtatggggttgcgccagacaggacgtcgtcgtagaagcgctgtttggcgtcgatgaagtcgatggaatcctggatttccgcgagctgctcgaccagccgcgcccgcttgccggcgagcatctacttgcgttcggggatgctcggctcgtggaggagcgtaaggggcgcgagtaggggttcgcggctttgctgcggtctctccctcacccggctacaccgggagctccctcgtcagagggagcttaaattcggtctggttataggcccatgggcttcttgggctttttggcgctcatgagcatgaggaagctgcgggactgggcggtgatcatgaagcccgcctcatagctcagcgccggctcattcgggttgtgcgtatccacgaccagctgccatttgcggccgtatcgctcatccggcagggtgaacataatcggctcgtaatgcgcgttgaagatcaggatgaagtcattgtcgaccatccggttgccgtaccagtcgacctccggaatatccgaaccgttcagatagatcatcatggagaacgcatgcgtgttctgccagtcgtccatatccatgatcgagccggtgtggtcgaaccattcgacctgcggaatcatgttcgaatcgtcgccgggctcacggcctgtgaagaagcgacggcggtgcaacaccggatgatccaaacgcagatgaatgagtttggaaacgaaggcgagcagttccttgcgtcccttgtcaagatgccagttggtccaggagatctcgttgtcctgacagtaggcgttgttgttgccctgctgggtgcgggccacttcgtcgccaccgcaaatcatcgggataccctggctgaacagcaacgtggcgaacatgttgcgcatctgacgctgacgcaagtcgttgacgtccggaatattggtcgggccttcaacgccgcaattccaagagcgattgttgctctcgccgtcgcgattgccctcgccattggcttcgttgtgcttttcgttgtagctgaccaggtcgttcatcgtgaaaccgtcatgcgcggtgatgaagttcacggacgccaccggtcgacggccgttgacctgatacagatcggagctgcccatgaggcgtgatgcgaattcgggcaacgtggagggctgtgagcgccagaagtcgcgcaccgtgtcgcggtagcggccattccattcggaccagctggacgggaagccgcccacctgatagccgccggagcccagatcccacggttcggcaatcagcttcacgcgcgagatgatcgggtcctgctccacgatgtcgaagaacgcggacagcttgtcgacctcctggaactggcgtgccagcgtggcggccagatcgaagcggaagccgtcgacgtgcatttcggtaacccagtagcgcagcgaatcggtaatcaactgcagcgcgtgcggcgagcgcataagcagcgagttgccggtaccggtggtgtcgaagtagtgctgctggtcgccttccaccagtcggtagtaggaggcgttgtcgatgcccttgaagctcagggtggggcccatatggttgccttcggcggtgtggttgtacaccacgtcgaggatgacttccatgccggcgtgatggtaggccttgaccatggacttgaattcgttgacctgctcgccgcgttccccggaggaggagtaggcgttgtgcggcgcgaagaagccgatggtgttgtagccccagtagttcgacaggcccttctcctgcaggaaggagtcgttgacgaactggtggatcggcatgagttcgatggcggtgacgccgagcttcttcaggtattcgatgacgctcgggtaggccaggccggcgtaggtgccgcggatgtccggcggcatgtccatgttgaggttggtcatgccgcgcacgtgcgcctcgtagatcaccgaatcgtggtacgagatgtaggggtgctggtcgttgccccaatcgaagtagggattgatgacggccgacttcatggtgtgggcggccgagtcaaggtcgttcatcgccgaggtgtcgtccgggcttttgaaccagtaggagaacaggctttcgtcgccgtcgatgttgccttcgatggccttggcatacgggtcgagcagcagtttgttggggttgcatctgaggccgtgcatcgggtcatagggaccgtagacgcggtagccgtagcgttggccgggctggaggccggggatatagttatgccatacgtatgagttctgttcggtcatttcgatgcgcgtttccgcatcgtgctcgtcgaacaggcatagctcgactttctgcgcaacctgtgagtacagcgcgaagttcacaccggcgccgtcatagctggcgcccagcggatacattgatccaggtctgatctgcatagttttcagtatcccactttcttgtgtcactgatgtgccggggagttgaacgtcaggagaacagcgacggcttgtctttgtcggagttcctgacgatgagtctgcgtaacgcctcatgctggatggcgatcatcgaattggatgaggtgatgcgcgtggcggcaaggtcgctccacggaatccacgcggattccacgtgctcgtccgcgtcgaaatggcgctgctcccgcctgaacgggcccaaatgcaacaccatgatgtgggccagttcgtcggtcatgccttcggacgagtagaaatcgcccacgaagtcaacacccatggtgtcacggtccggcaccacgccggtttcctcggccagttccctcagggccgcgtccatgatgtcctcgccctcgtccatgagaccggcgggaagcccgtaggcgaacatgtccgatccggcacggtattcgcgttcgatgaggtaacggtcggtggacatgtcgtgcacgagcatgaccacacagggggcgtgacgcagcacctggcggccgatctcgtgttccttgccctgcttgtcggtcagagcgatgcgcatgtcgtccacgtggaagatgcgcccggtataaacggtttcgctactgatcactttggcgggcacgtccatgtcgatgccgtccgaggaggcgttcagcttatggtcgagccgatgctccagttgttcctgcttgcttccgccagacatgtcatctcctcggaaaaaacgtttttgccacgttactatagcgtcttaatctcgatgcgcggtaatggacagcgtccatggatcggtcgtgtcgtggaaccactcgacttcaggccttgctccggtcgcttgttcgatggcggctggcacgtcatcgatcgcgtagttgaaccacatggattcgatggcggcatgaggggtgttgatgaagcagggacgcacatggctctcccccgccattccatggccgagcatgatgccttgggacctcatacgggcttcataccgggcttgttcgatggcgtcggtcaccgggtggtgacgcaaatcgctggttacgtacacgtccgcaccggtggcacgtacctcgttgaacagggagtccccggagccaggcagaatggccacatactgaacaaaagtgtccgaatcgccgcatacctggatgccgagcgcgctggtcatgccatgatcggacacttcgtcgaatactcgctgagcgaaatccttcagggcaacaggcttcggcaaacgacccacacgccccaagccgaccggatgagaggcgtttgcatcgtcaatcggcacgagtggtttctggtcgatgagtccgaagtagtcggccgccgcctgtcccacgccgcgatacgcagcgtcggcattagtgtgccctacccacagcccgcagccgtgctggtagagtctgcggacgatgtcgccccggaaaccgagtccgctcgtctcgtgtacggaacggaagaacaacgggtgatgggtgatgagcaggtccgcgccagtagcgatagccttgtcaatgatggcggaggtcgggtcggcggcgaacacgatgcggtgcacgtcgtgactcagatcgccgacaatgaggcccggctcatcccattcctcggcgtagcgcaatgggtacagggtctcgagaacgtcgatgacttgcttgagattcggcatatgtcccattgtagtgggctattgctgcaagggactcattctgcaattgcggacaagccatgctcgtgctcttcattgctcgactatcggctcgccttcgcctacaaacaatccactggactgtttgctcaacggctcagccccctcacccgaggggagctagaaattgtcagtgtgcagcgagttgccagtcggaaccgatgccgcacgatacgtccagcggcacggcaaggtcgacggcgtgttccatggcgttgcgcaccagttcggtgacctggtcgccttctcccggcgcgatttccactaccagttcatcgtgaatctgcagaatgatacggctcttgacgtgagcctcggccaaggtctgctcggcgcgaatcatcgcaatcttcatgatgtcggcggcggatccctgaatcggtgcgttgagtgccgcacgttcagcggcctcacgcgcaacacgattggtcgaatgcagggccgggaagtagcgacgtcgtccgaaaatggtttccgtataccccttctctcgggcattggccaccagcgattcaaggtaatcgtgcaccttgccaaaggtatcgaaataccggtttttcaacgcttccgcttcacgtggcgcgatcttgagttgctgggcaagaccatacgtgctcagaccataggccaatccgtagctcatggcttttacgtggctgcgctggtcgccggtgatctggtcgaccggcagcttgtagaccatcgaggccacgtatttgtggaagtcggctccggagcggaacgcttcgatcagcgcctcatcatcggacagatcagccataatgcgcagctcgacctgtgagtaatcgcagctcatcagggcctcgtacccctcccccggcacgaacacgccacgaatctcacggccggcggcgttccgattggggatgttctgcaggttcggatccacggagctcaatcggccggtggcggcaacggtttgctcgaaagtggtgtggatgcgctcatctgatgtgttggtggcatcgatcagcgtttggacgatctgcttgagcttgttgatctcgcgatggcgcagcaacgctccgaggaaaccgttggcccgctcattgtccactgatttgacatacagatcctgcaatgcggccgcattcgtggtgtatgagccggacttggtgcgtttggtgggtttcaaacccatatcttcgaacagcaccttctgcagctgcttggggctttgcaggttgatttcggtgccggcatactcccaagccatttcctgcgcttggcgagcctcggcggcaaactggtcacgcatggagacgagtcgaacgctatcgactttggctcctgtgtgctccatgccgtgcagcacgcgggaaacaggaagttcaatcgcgcgcatcagccagcattgttcacgctcgtcgataatcggcccgagcgtgacggcgaggctgcggataatggccaaatcacgcagacgatgttcgttcggatcttcttcgacctgatcgtcgtcgaagtccaacgtgccttgcgaaggctgttcggtttcggtgaagtggatgtcgaggaagtgctcggccgcctgcttgaggctatcggcatggaaatccggttgggccagatacccggcaagcttggtgtcgaacatcggcaggtccatgtcaagatcgaccgcgcccaaaagatgcagcaattctttatacccatgcacgatggtgcgggagtgttcgcttttcaggaaccgcgcaagctgtgctcgcagggtatcggtgattggaaggggcactatggccgctgatgttgccgtggccacggcaatggcttgtgccgtggcacgccccggcctttcgtcgccccatgcggccacggtccaagcgtggccgaccgcgtcgccgcagatggcatgccgctgcgagccatcgccatagtcggaaaccgtgaaatcggcgatttcaccgggaaccttgacttcgacgcgatgggccttgacccattcgtcgaactgctccggagcagtgatgctcgtgggttccggcaggttcagatcgaggctgctatcctgctcgttctgctcattattcgtagactcgccagctccggatgtgttggatgccttggccccggtattgaaggttttcagtacacgactcttggtgcgaggtccgaattcaagctccttgaacagggcgtcgatctgtgccacgtccacggtgccgaatgtcagatcctcgatatcgacgcctagatcgacgtctcgtaccagtgcgttgactttgcgattgagtttgacctggtcgatattggcccgcagtgattcgccttttttgccgccgatttcatcggcgtgctcgcaaatgccgtcgagggaaccgaattggttgatccacttggccgcaaagccgtcgcctacgccgggcacaccgggaatattgtcggcggtttcgcctcggagtgccgccagatccggatattgtgcgggagtgactttgtatttgtcgatgatggactgcggcgtcatatgcttcaggtctttgaagtgatggcccgggtacaacacggtgacgttgtcatccaccagctggaaagcgtctcggtcaccggacaataccagtgtgtggtaaccggccttgtctcccatggtggcgagggtggcgatcacgtcgtcgccttcgaatcccggcttctcgatgtaggtgacgccgagggccgtgagcatgcgttgaatcaatggcagctgggtgagcagctcttcgggagccgcctcacgggtgcctttgtattgcggaagcatctcattgcggaatgtgccgcccttcacatcgaaggcgacgcccagatggtcgggcttctccgcatcgatcacctgcgcgagcatggtggcaaaaccccagacggcgttggtggcctggccgctggaggtgctgaagttgtcgaccggcagggcgaaaaatgcacggaaggccagcgagtggccgtccaccaccagcaatgtttcattggtgggtacggtcacgctggcctctcccatagtgtgtttgtgttgctttacgactcagtacggcgacgccgataatcagcgttcgcccgaatcagaaggcttcggatcgccgtacttggcgatgatggcctgagccaggcgcttcttggggatgcgctggtccatggaggtcttctgaatccaacggaaggcaccctgctcggagaagtccgccttgtccatcagcagacccttggcgcggtcgacgagcttgcgctcctcaagcgtgtcttcggccttcttgagcttctcttcggtttccttgagctgatcggtggtttccttgagcttacgttcgctgcgctccacgctgtccagcaaatcgttgatctcggcgaaacggcccatggccacctcgagggtcggcagcagcttggattcctcgtacggcttggtgacgtatgctatggcgccagcgccggtggccttcttcaccagatcggtctgggagaatgcggtgagcatgacgacgggggcgatgttttcatcgcagataatgccggcagcggtgatgccgtccatacgcggcatcttgacatccatgcacaccacatcagggcggtacttgcgggtcagttccacggcttcctcgccgttggcggcctgaccaacgacctcataaccgttgtcttccagcatggcgaccagatccatgcggttcacggcttcgtcctcggccacgacaacggtacgcggaccgtcctcgggcttggccttgcgctcagcaggttcgctttcattggccacggccttgagctcttcgtcggtcagcacctcatcgatgttgatactcggttcttcggacttcttccttgcagccatgccaacctctttcttgaattacccaacaatggggttcacaataatttcagcgaactcctaactaaagtgccctcggtgggactcgaacccaccaccttcgcataccctgccgagctgagggcaattccttgtcaggaatcgcttctgactcagtttaccctcctgtacatcctgttcgcggtttctctgcgagttttgcccgcacgctgaaccgttcccgttttgtacggcagtcaagagtagcggctgcggacgcggcctgtcaaatatcggcgtgtgggagaatggagtttccgttttcgcggagtgtccacatagatgcagggtttaccaaggtgaccgtgttctttagggtgtgcgctgcgcgaagacggttttttattggctgaaggaggccgaagatggttgaagagacaaagaggcccttgcgccgcaggcgttttgggtgcattctcgaacgcaagggttcgacaggggatgtcacgagcatcgaggctcgttatatctcgccgatcaatggtcagcgtgtgtcgaaacgtttcgcgccgggcaggcggggcgatgccgaggattggctcgagaccgagaggtcgatcgtcgatctgcaccgtcgtgggatgatgacgtggattcctccacgggaccgggatgggaacacgttgacgccgaagctgacgttcggcgtgttcgccgacgggtatgtgcgccggcatcgcaggaaggacggcgccgagatcgcgggctcgacgttgcgtaacctgcgcaatgacatcaagcatctcaaggaggcgttcggcgacgtgaaactggccgagttgaccgaggagctggtgaccgaatggtattacgggccgcatccgaacggggaatggcagttccgctcggaatgcatccggttgaagatgctgttgcgggaggcgtgtgcgccgggctccaagggcgctcctcccctgttggcggagaacccgttcacgctgccgatcccgcccgagccggaggccgggtcgtcggatattccgccggtcgcgcccgacgaactgtaccatatatataatgcgatgccggggtatacgaggctgtcggtgtatctcgcggcctgcgcgggcggcatgcgcatcggcgaggtctgcggtctgatggacatggacttcgacttggagaacaaggtgctgatgatccgtcgcagcgtcagccatggcgcggatgatctggggccttcccggatcggcaggctgaagacgaaggggtcccggcgtacggtgcccatccccgacatgctgattccgttgattcgcatgcatctcgaggatcgtccggaccagtcgaaccacatgttcttccaggccaagcgcggcgagatcctgtgtcagaacactctgcgcaaccacttcatgaaggcccgcaaggcggcgggccgtcccgacctgcagttccgcactctgcgcgtgacccatgccacccgtctcatgctcgatggcagcagtctcaaggagacgatggacgccctcggacatgtgagggaggagaccacgttgcggcattacctgcgtgccgtgccggagcatcagagggaggccgcggaacgcaccgccgcctatctgctgtccgcggacccgtcgctcgcgatcgcctcgctgcctcccgctcccgccgggctggacgcggacggcgatgcgggcgacatggccgcgctggcgttgctgcttggccaggtgtcgacgctgatggccggcatcgccgcccggaacgcgcagccggccggatagcccggcttccgcccgcccctgcggtcacgcgcctatggccggaccgtccatgcccgcatcctgcgcgggtccgggacggtccggcgtttccatgggcatcgcgccgggcagtgcggcggggtcggggaacatgttcgcggcgggccatagcccggtcggcccctcgtcgggtgcgggatcgtagccgggggccgtcgcctgcgcctggcggatgcattcgctcacactcccctggaacgtgctcgtacgggtggcggcccggcggaccaggtcgaggccggcggcgtcgctgcggtccatgtcgacgatgagcatggtcggcatgcccgcgccgaggatcaggtgccggtccgtggtctctgcgaggtcgtcgtgcggcgtgatgatcggatggtccgtgacctgcaacgggttggcggggtcgtcgggcagagcgaggtggatgtcctccggcttggtggcggggatgcggatgggttggacggcgagcggctgggcggggtcggggtttctggtggcgatttccccggtgatccaggcggcgttccagtcgtagacgccgaggggtgcgtgcaggtcgggctcggccatgacgcgggcctggagcgcgtgggcgcggatgacgcccctgttctcatgccagtgggagttgaggagtccgatggaggcgagcagctggtctcccaccatgcggcccttgtccttgtatctgttccattccgcggctccttgcggctggtccgccgggttgagcgcgtcgcgtgcgacctggacggtgccgagggcgtgcgcgaggtcgagcgcgatgtccttccatgggcggcgggtgtcgatcgcgatggtgtgttcgtcgagccggtagcccatgggttcggcggcggccttcgcctcgtgcctgacggtcaggccctgccgcgtgagggtcttcgagagggcctgtgcgacccgtgcgaacaggtgggtctcctcggcctcgtcgagcgtgaagtcgggcaggatgccgcccttctcctggatgttttggatgtcctgttcggtgtagtcgccacggtccttgagatgcgggtcctgccaggctggcgtggtgttgcgggatatgtcggccatgatggtcctccttgatgggcggggccgtctttcggccccttcccatccggcacccgcacgccgcgagccgccggccgattgcatcccgtccgtcaccggcatgtacttcacgacgtacaatcgggatatgggagaaatcacgatggaaccggcttaccacggtatcgaggaggagaccgtcacgcgtctgccgtccaaggcgttcgacgagtttctcaaggccctcgacaggccggtgccgcagaccgcccgggaccttatcggcatggagcccgattggctatgaggttcgcgtccccgcgtagggcctggtccggcgacgtgctcgacgggtccggctgcggccgtcgcgcccatctacgagcggctgccgcttcgtgcgcgggacgccgagaaacacggacatcggccgtataacgtaagtcggaaaaacagcaggccctccgccgcgggacggagggcctgccttcgggcggagaatcagatctcggccagcgccttgtctaggagcgtgcgcaccgcattgctgcggctcatgtggtgtttgcgcatgtaccgttccagcttctcgtcgcgttcgtcgtccagacggacgcggatcacgttggaggcaggggtgctgcccacggctaggggacggcctggggttctcttcagcgcctcggatagctgctcgtcggtgtagcccctctcggcctcctcggcatcggccttgagcatcgcggcctcgtcggccggcagttcgtcgtaggagaggatgtcgtagttcatgtccattgcctgcctccttccagcagtttcacgtattgggtcctcatgcgcatcgcatggatgagcgccggcccctcgatgtgtcggccaccaccacctccagtggaaggccgtccggtgatatacccagatacaggaccttgagggggtcctcacgcagcacgaggtcgcgaagcggatgctccaccacgtacatggcgtcatccggttcgatgccgtgcttgagcgccgaggggaatatgttcacgataatattgtgacacaaaataggcgacgggtcaaggacgtatggggcacggtccgtcacggccattgtgatccagtcgacgatcgagattctggtaggtggcgatctcatcctattgggcttggccctgtgtcaggtcgcgttgccgttatcggggctccggcctgtgtatcgaatgcatacgccgtccagcgaaaggtcttttatcatgcgtcccgccgttcccgtccatgtgaaggaggacgtcgagatcccttccctgcttgccgaattccgcatgggtccgacattctggtccagggtgagttccctagaggtctcgtattggcaggtccgtcggggcaaccgtctgatcatcgaggcgtgctggatggggatgactcttctgtccttgtcggccattgtggtccagttgacgatcgaactgctgatgggcatcgatctcttcctgttgggattgatcctttgcctggtcgcgttgccgttggaggccgcctgctggtggcgttggaggctgtcgcgtatggacgccgataccgccctgaccctcgcccgggcgttgtcttccttccgggattacgtctcggggagctgaaccaggcccgcgcattgggcctccgcctcggagaatcccggcagggactcgtaatggttcttcaccgtgtcgtccaggatatcctttttcccgagcctgaactcgattcttttcccgttcgcctcgtatagcacgtatttcgattggctgattcctccggcgtccatcctggtcggcgggttcgtcgacgacgtgttttcctttgctgtttccgagaagaacaccaagcgggattcgcctggctggagcgtgacctgtctatcgtgaagtagtttcacggccttttccgattcggccgcggcgaaggcgccgtccttgtcgacatcgggtatgcacacttccattctggttccgttgtcggtttggcgggaaatgtcgagaatggtgcccggggtgcgtcccgtgttggtcacgatcaccgcctgcccctgttgcgagaagagtttccgggtcccgtcgaatgtcgacagccccgtggcttcgtagagcgctttcacatcgaataccgcgccttcacggtcccattggacgatctgggctcccatggcgatgatggagacgaccaaggccgcgatggagacccatagggccgcccgatccagtccgagggatttctcctcggaggattcccggcacttgtcatcgtccccggccgggaccttcgttttcgacggcatggccaattgccttttcgggtttttccgactgttcccgttcttcgttcttcttcgtcccattcttccttctccgacgccatccgatgcgatggggttcattatcctctttggcccgatatcggcgggacccggtgttgcggcggcgtggatggctggattgcgtgtcgtgtgttgggaggcttgcatggctggtggcgaggggaagcgggggtcgtcgggcaaggcgttcgtggtggccggcatggcggtcgcggccccgctgctcacggtcgtggtcgtgttgttgtgcctggtgatcctggtggtcgcgatcctgcagtcggattacggcctggggacgcgttgcgtgacgggctcctcatcgtgggtggattgggcggtgtcgatagcgaaggacgataaacatgggtattcgcagcccaaccgcgggggcgacccggattacgactgttcgtcgttcgtgtgggcggcgttgcgccatgcgggtttcgacgtgggttcgagcccgttcaacactgacggcatggattcggtgttgaaggcggccggtttcgaacggtcggatttcagggatgtggcgtccctgcaggcgggcgacgtcgtgtgggccgacgggcatacggagatctacatgggtgatggcgagttcgtgggcgcgcattgggacgagaggcacggggtcgagggcaggacgcccggcgaccagaccggcgacgagatcggcgtgacgtccacgttgaacgcgcggtacacgcgcgtgtaccgtgcgccggcctcgcagggctcgcaggcggtgtcgggcggcacgtcggattccggttgggacgggatgggcgcggagcaggcgaaggccgcatggttcggcggcctggccggtccgggcaatacgtgcgtctcgtatccgcagggccagtgcacgtggggcgcgtgcctgcgcgcctaccgtctggggtggaagcatgtgggccagtattggggcgatggcggcatgtgggcctcgtccgcggccgcggagggttacagggtgacgcggacggccccggtgccgggcgcgatcgtgagtttcccgcccggcgtgcagggcgctgatccggcggccgggcatgtggccgtggtcgagtcggtggacgcgtcgaagggcacgttcacgatcagcgagatgaacgcgcacggcccggtgtacacgtcgcgcgagctgcccatcgcgggcggcgcgaacttcatccttcccaaggacccgatccacggggccggcggcggctcctcgtcgacggcgacgtgctcggcgggcgaccaggacggcgagaaggcgagcgtggaggaggcgaagaggatcgcgaagcgcaagatgaaggacatgggctgggatgacggttcccagttcgagtgcctggacacgatcttcaccgaggagtcgggctggcggtgggacgccaccaacccggacagcggcgcgtacggcatcccccagtcgctgccggcggagaagatggcctcggccggccaggattggcggacgaacgcggccacgcagatcgactggggcctgaaatacattcgtgacaggtacgggacgccgtgcggcgcgtacgcggaacgcagggccaagggctggtactgagattatcggcgtccgttcgggtggtttttccgggagcggtcgtctcatggcgttcccgggccggccggcgcatgattttcttctctttattcccgtgcgccggcgggccgctttccttcacggccccatgccccctccccgggcgtggggtctttcctttctttccggcccgttatcggccgtgggccgtgccggcgcgtggtggatgcgcgggcccgtgttgtcgggccgtggaggcttgtgatgagggaggctgtgatgtccgggatggtgttggccgatgattcgctgatcaacctgttccccgatcccgcgtgggatgtggcggggttccgtgacctggcgggaggcgtgatagcggtgtgcctgtacgcggcggtcgcgatggtgatcgtcggcgtgctgaccctgctgccgggcctgatcacgaacaacatgatggagcgcgccttctcctggaagcgtctgctgtgcgcgttgatgatcccgttgacgatcggcgcggcgacgagcgggttcgcgtggggcgcgggcgcgttcggcgcggacgggctggccgtgaaagactcgtaccagtccgcgaacggtcatcccgactggaatggcgtgaagaacgacgaggcgaagaagtcggacgatctgggcggcgtggtccggcagttgggcgaggacatcgcgaaccgtgtgggcaaggccgcgggcgacgcgatcgacaaggccctgtcgacgggcaagaaggcgtggcagtggctgtccggcggcgacgggaagggcaacgtgttccagaaggccggggacgccgcgtccggggcctgggactggctgtccggcggcgacgggaagggcaacgtgttcgagaagacgggccaggcggcgggcgacctgtggtcgtccctgttcggctgagccgtccggcccgttatcggcgtcgggcgtcgtacgggcccggtggcggtggggaaaggagggtgaatcatgaccattattcatccaatcgccgccaccgcgtccgatatcgtgctggcgttgaccgacaacgacctgtccgggttctccgtgtccccgaactggacgttcttcccgttcatgagcctggtgtcgaacatcgtgggcggcctgtgggctttgggcatcttcgtggcgacggccgcgtggatcatcgccgcgttctcctgggtcgtgtccaaggcgatccacaacagcacgatgcagcagtacagcggcatcgtgttcgtgtggatcgcgctgggcatgatgctgctcggctcggccatggcgatcgtcaagttcgcgtccacgcaggccctgttctgacctcggggcccgttcccttttttccgggcccgtcccgccgtcggggcgggccctttccttttcttgtttttccgttgttgggaggctgtcgtgggcgatgtcgtcgaggcggtgctgcagaagctgttcccgtggatgctggatccgatgggcaaggcgttgcagggcatgatggtgggcgcgttctcgtcgaccgccgggtccgtgtcgtacgcggagtggaacgtggcgatcacggccgcgaacaggatcggctgggtgatggggttcgtgaacatgctcatctgcgcggtgggcgcggtgcatgcggccgtgaaggccagcccggcggagtcggtcaagtcgttcgcgatggcggtgctcgcatggccgttgaccgcgatctgcgtgagcgtgatgatcacgtgcgaggggatcgtgagcctcctgtccgcgaggatcctcgcggtgggcgcggacacgaccaagggccggggcatggagtcgatggtgtcggccatgttcaagaagatcctggagcaggcgtccgtcctgcattcgctgacgatgctgctcgtctatctggtgttgttcgtgggcgtgttcctcctgtgctgcatgctcgcggcccgcaccctgtgcctggtgctgctggccgcggtcgcccccttgccggtgatgagcgccggctggaaggcgacccggccggcgatgcgccgctggctttcggccgtggtgggcgtgatgctggccaagccgttggccgcgctggtgatcacggtcgggtcggcgctgatgacctcgcagaccacgtcgggcgtgggcgagggcagtttctgggatctgctggtcggcatcgccgcgatctacatggcctgctattcgccgaagatgatcatgccggtcgtgcagttcctgggcgacgaccggagcatgggcatgcagcaggccgcgagccaggcgggccggaacgcgctggtgaccgcggcccagctgacccggcaggtcgtgaccgcggccgccggggtggcgaccggcggggccgcggcggcgggcgtgcagttgcccggcatggcgcagggcggcctggccgccctgaccggccaatgggggcaggtcggcgaacaggccggaaaaatgctcgccggctccaagtccgacggcaaggacaaggatgatggcggcggggcccgggattccggcgcccatgccgccgacccgtcgaaggacgacgggtacgagccgccggtctccgctcccccgggcccggatggctcggccattccgtcgcccgatggcgcgtcgtccgccggaaccgcgcccggcggcgccggaggggacggtggccggggcgtcgcgggccttgacggttcggacggtgccgacgggatcggcggcgagggcggcctgggcggcgccggcggcgagggccggaccggatcgtccggcgctccggggtctccgggcgatccggggcttcccgggatgcccggaccggacgcggtgccggcgcccccggtctcgccgcagtcgccgtcgggcccggtcctggcctgacttatcgatgcgttgccgggtggcgtccccgtatgggcggggatcgcgcccggccctttttcttgtttgatcggaggttgctgatggtggatgccgatggcagggacggcggggcgagggtgcccacggcggcgttcagccgcctgtcggccacgaacgtcttgttcgggtggacatggccgcagatcggcgtgggcctggccggcctggtcatggtcgtgggcggcgcggcggcgggcatggtgctgccgttgatgctcgcgggcggcgtggtcatggcgtacgggctgatccgttacgaggggttgagcctgatggcgtggacgtacgtgtggctggcgtggcggcggcgtgtgcgcgacgggtcgacccgatggtcgtcgagcccgctcgcctcgggccggccggcgggcgtgctgggcgtgtggggccaggtcgggtcccgggcccaggtggtcgaggggtccggcgtggaggtggtcggcaccccgttccatggggcctgctacctgttcgacccggaacgccggcgggcgaccgcggtgctcgcgttgaaggtcgaggagtggacgttgagcacggatgcgtcgaaatcgtcgcgtgcggccgccttgaacgatctgaccgcccgtctggcggacacgccgggagtggtcgagctcaaggagaccgcgctcctgctgccgggagccgcgcccgctccggacctgcccgacgatggcgggtcgccggagtggatgcgccgtgatatggcggaattgtgggccctgccggaggtcatgaccccgttggcgaacgtgagctacgtgtccgtgacctgcgacgtggaccggctcaagggcgtggaccgcgcccggggccggctcacggaacgcgatcgggtcggggtcgcgttgggcgacctggtgaagatgaccgtggccccggccctggtcgaatgcggggcgcgccccggttcggtgcgctggtgcggcctggacgacctgcgcacgctgatccggtcggtttcggatccggccggcaacgcggaccgtcctccggtcacccgtgacgagccgacgctgggctggtgcgaggagagcctcgacggggagagcgtgaccctggaatcgtgcgtggcgcgcacctggtgggtgacccagtggcccgaccggcccgtgccggcgggctggacgcgcgacatcctgcagggcggcaggatgatcgccctgacccatatctggaggcccatgagcatggaggaaagcgagaaggacctgagggaccgcgagtccagcatcctgcagcgcgacacgttgcagaaccagcggaaactgtcgcgcgacgaacgccgtgagcgccgcgagcagcggcagcgagaggcggagcaggacgcgaactggcccgacaccgaccatcaggggtatatcgccctgttcgccccggaccgcgacgcgctggccgtgttcgaacgcgacctgcgcgtgcgcgtcggcaagtaccatctgcgcctgtccggcctgcgcggacagcagcggcaggcgttgaccgcggtcctgccgctggggttgtgaccatgggcgcgcagggccaggaggactggttcgacgaggtcatgcccgggttggacgacgggcggcctggtgggaagcggcgttttccgtggcccggccggcatgggaaggacgacggggacgaggccgaggcccgcaccaggccccgtatcggggtgcgtgtgggcgtggcgacggtgatcgtcacgggtctcatggtcacggccgggctgactgcgggcatggtctccgcgaaccggcgcgaacggctggccgacgcgtcggcggcgtgcgagcggtccgcccgggcatggtccgcgggatcggccgcatggggccgggaccgcgaccggatcatgggatcggtcgacctcgacgcgctgcgcgccacggaccccgatatggcgggctccctcgaacggctttccgccgaccccgtcacgccggccggatgcacggccggaggcgacgcggcaacgctcgacgcggacgcgaaacgcatctccaaggccgccgacaggctcgcgaaacggtcggaacggctggaaaaggccgtggcgaaggccggccagacggtcggcgacgccgaatcgtcacgggccaggagccggctcgaacatgccgtggccgacgcgcggggtctgctggcggggagcacggcggaccagtacaaggtgccgtacctgtaccgtcggctcggacagctcacggaacaggcggcggggctgctcgacgacgggtccgcgtccccggaggacatggaccggctctcccagggcatcggcgccatggtcgcctcgctcgcctccggcacgcgatgacgggccgccatacggttatcggtccggcgcacgcgtgtacgggcaaacggatcaggaaacaggaaggaatcggtcatgtcgtgtcggtcagagggttccggactcatcgaacgcgccatcctcgcgcgatcaatgggggcgggccgatgatgcacctcgtactcgtgatcgccgtcgtcatcattctcgccgcgtcctgtctgctgacgttcgccctgtgccgcgcggccacgcgccgcgacatgctcgaggcccgttggcgtgaggagtcggccggttccgtgggtgaggagagccatgagagcgcatgaaacgcttgagcgtgccgggcgtcatggcggcttcccggcccgtggttccgcttcgggcctgttggcggcctgcccgtcggacggcagccacgacttctacctgtcgatgatgctcgacgttcccgtgccgcgcgtgcccatgctgcgcgcacgtctgcaagactcccgccgaggggcgcaacgcgcatccgacgcacaggaagctggccgcgtggtgcaagtgcagcgcgggcacggtcaaacgccacttgtcatggctggaagggggacgtgtggtgatggagcagcggttccgcctgcgtgacggctcgccggtcatgccgcgctggcgccgttgacgatataggcgtccttcgtgggtgtcggcgtcggcgatcatgtgctttttccgttcagggaggtttcgcatggctgacaatcctgccggggtccgtgccggcaaggccgggggtccgcatgggttgcgggtcctgtccccggccgatccggggtatgtggagtggtgccggtccggcatgccccagaggatccgtctgctcaagctcgccgccgagaaacgccgccggatcgagcagggcgtgatctgtccgaaatgccataggcgccgggtccgtgccggcgacacgttgtgcgcccagtgccgtcacttggaggatctgccccgctgccgggaatgcgggaggcggacgagccgtcccgtggacgggttgtgcgcccgatgcctgaaactggtccgggaacaggccaggccgatgtgcccgaaatgcggcaggtgccggtgcctcgaggtcgaggacatgtgcggcaggtgccgggcgcaccgtgtgttgccatcctgttctcgttgcggcgcgccgcggcggaagggctcgccggacgggttgtgcggccgatgccggcagctcctttcggggaaggcgaggacatgaatctggcggacgtggccttggaggccctgtacttgctgggtgtactgatgtgctgcgcgctcctgtcccgcgaggagggctcgcgcgagggcctgggttcgcgtcgcgcccgcctgttcatgctggcgttggcggtggaggcgatgcaggcggggttgggttcgctcgcgttccgggagccgtggggcgcgccgttcgcgccctggcaggcgttcgacctgacaggagcggtactggcggacctgttcctcgcacgggccctgctgcgcggcgacggcggggctcccggcccggactaccggtgacgcgtaccgccggtcattcctcccgttcgtgttcgtgttccacctcgaagcggatcttgagccgcgtacggccgcggcgggcatggcgcgcgattcggctttgtctgccctttccaccctcccggacgttgtggcgtgcgtggcgtccccgcgcacggacgcgggcaagaagatttcttgcggccgccatgacgcgcaggagcgacagcgccacgaggcagccgatggcgagcagcgccaccagatcgtggttccgggcggcgggcaggttcaggatgatttcgaggatgtcgagcatggcctcgatggtgtttgcgatgtattccatgtgccgctgtatgcgtccgacgcccctgctcatgttcacgtccgattcccggtccgatgacggccgggaacgttatggtcgtccacccgccgaaatcggtgccgccgcgggtgatcgcgccatggggaaggaacatcctgaatgattggccatattggatcggagtgcgggaggaaggccctggactttctggccgtcgggcggtcccgcctcactgcatgtcggctgcgcggccggcgggctgcatcgtccggctcacactggaccagaaccggacatgccgtcgaaacccctataattgtcatgtcgtcagaacaagcccggagaaggatatgccatcaatgcttacagtcgcggagacggggagcttgtccgttcctctcgtctccaaccacgatgtggcttcgccgttgagatatcccggcggcaaaagcgtgctgtccgggtacgtcgcctcgcttatcgatgttctcggcattcgtgacgtcacgtatgtcgaaccctatgccgggggtgccggtgtcgctctgcgtctgttgaaggaccacaaagtatcgaaggtagttatcaacgactacgatcccgacgtgttcgcgttctggaacagcgctgtcaatgattcggcttcgttcctggaacgattcgaccgggcggaacccactatcgaggaatggcataggcagaaacgcatcatcgcggaccctgccagcgagctggacagggggttcgcgttcttcttcctcaacagaaccaacagatccggcgtgctgaacggcggcgtgatcggaggattgaaacagaacggtagatacaaggtttcggcgcggtacaacaaggcctcgctaagacgaaaacttgaatttctcggggaacacgccgactccatcgaggtcagaaacgaggatggcagggccgtggtcgaacgattcgtcggattccctgaggcgttcatctatgcggatccgccttacgtggagaaaggcggcagcctgtatatgaacgccttggacgatgagaggcacagggagctcggaaatctgctgaacaatcatgccgactcccattggatgctcacctatgacgatacggcgttgatacgcgagctgtacggggaacggtacggtggcctgtttcctttgcaatacagcgcctccgcccggcgcaccgcgaacgagctgatgatcttttccgatacactgggcaaggccgcagcccacatgcactgacgcgaaggagaggacatggcgaatccgtccggggaaaagaatatcggcccatgggagggccagcaggtggagtacattccgctggatgatctggtcctgtggacggagaatccccgcgatccgctggatggcgattacacgaacgacgatgtcatccgtcgcgcaaccgacggacgcaacgacaagcaatggcagttgtccaagctgtcgaaagagatgggcgacagattcgatttgagcgaactgcccacggtatgcagaatcgatgacggaccgaagtacagggtatacgacggcaacaggcgtgtcattctggcgatgctccgcaaggccggtctcactactgagggccagcaacaactggtgcctccggatttcccagaccccatcccatgcaacgtgtgcgacgaagagaccgcgctggagaatgtggaacgcaagcacagaggtaacgggagctggaaacagtacgagcgggaccgtttcatgttcgactacaggggaggcccgaaaaccgttctcatacggctggaggagctcatcaaggcggtgacgaaatggcccgccctgaacatgagatacgtcgaagatgacgtcttcaacaaaaagcatctcgaggagatgggtcttcttcccgacgagccggacttcggggttcctctggagctgctggaggagctcgtggaggccgtcgccgacaaactggataatgagctgaacacgcgcaacgcgcgaaacgaccccgccagcgtcctaccgggcgaactcatggaccgtatcagagaagcacggcaccgccgaccggcgggcgaaaaggccgacggacgggaaagggaacttccctccgacaattccgagcctccatcgcaatcccatggtggtcctggccgggatgatgtgcttcgccccgatacgtccgggacactcccccacaccgatgcatccgccaggaggcgaaggggacgcacccgtcaggtcaagccggcatccattcccgtgttcgggaacccttcgggtctacggctgcagacgggagacgtcaacaacatgtatcgcactttggaggaactatggaacatgtatgcgcgcggaggcggaatgccgccgcgttcgtgccgatctttcgcatggggctgcgtctgctgatcgatacggccgccatggaacgatgcggcggattggacagatatgtgggcgagtatgccggggaagcgaaaaaacgtctcaggcaggcggcaaacagcgctgatctcgttacctttatgcgcaaccaggcggtgtcgccggaaaatctgctccgactgctccagaacggcgcacatgcgtatacttcgaccgggaacaaggaacaagccctagccatgagtatcctgatcggggaaatgctttcgatcagccacggacgtccatgattcgggggaacggcgtttcatgggacacaagactgtggcagccatttaccagcaaatcgccgtgacgggccgagcttctctataaaccgggtcgcgcgttcacggacggtccggaatccggccatcgcgcacagagtttttcactcctcatcaagccgatacgggggcacgttcggcgtgcatcatggcatgagacgtcacactctcatgggacgggaaagaatttccggctgtcggaggacaatcgttttcgtatcggctttccacatgagaagggggaaacatggaacacggggatgacggtcgttcgcgggatgatgtcatggacggccccgcattgccgccggatgagtctgggcggatactcgatccgttcaggaaggccttcgcctgggcacgcgtgcgtctgaacctgtcgggagagcttttcggcacaccgcagtgtcctgtcgcgcggatcctcgcacccgtcctgaccgttctgggagcttcgatcctcgtgtgcgatctgttcgagagcccgtggagggaggtcctggccttcgcagctctggcggccgccttgttttccgtgggatacaggcctcatccgctcgacgcgttgaggaggcccggcaagcccatgcggtggttcctctgtctcgggtgcgtcctcgtcctgccggttgtgaccttctatatatcggcactgctggtttccctcatacccgacacgtcggagaacgcgggtatcgccgcgacggacacgttcggcgagtatgtggtcatgttcatccagatcatgggcgaggcgtgcctgtcgattcttctgttcgcggtgctgtataaagccctcaatcgggcatggggccggtcggatccatgggtccgtcccctcgtcgcgtggctggtttcggcctttctgttcggcatgccgcgtctgcctacgtatagatggaattttctgcaatgcttggtcatcttcttctcgctgttcctgggattcgccgcgttcgtcgcgacgcgcagctggacgattctgttcctttcccatttcctgtacgacctgctcagcaggcccctggtgctgaatgcgtgccgacacgccgcccttctgtggctcctggttgccgtggcttgcgtgtactggcatttcgggagtgggagcgccagccgtccggcttcccctcccgctcccccgatatcggcggattgtcgggtggatggcatgccggccggcgggatcgccggccgtggaacaggatgtgttcatgcggaccgtccccctctcccggaagggggtgccggcggctggtccgatgatgggaaaggaacgaggatgagcgaagaggacaaggtgccgtccccggacggcgcgggcgtggtgcccgaacccgagcctgagacggttcgcaggcgtccgaagtggctggcacccgcggccgtgggttgcgtgctggtgctgctcgccgtgggcggtgtggccggctaccgtatgtggtcggcgcgcgaactggccgaggcgaaggaggcttgcgccgtggcggccgacggggcgcgtggcgcggcgaacgactacaatgcggtcgtcaacggccaggccgccgacgcctcggcggtcaccgtcgaccaggtgaaggacgcgaggaccgtggacgcgctggccaaggcgttgaagaccacggctcccgagtatgaggggtgcttggccggttccaaggccggtttggacgaggcgacgtcgaagctcgacaggcaggccgcctggtacaggacccatgccgcatcgctcgggaaggccgtcaaggcggtggaatcctcgaggctcgacaggacggtcgaggacgcggagaagctgctcgccgattcgaagggcagggtcgccgacgagaagacccgtagcatgttggagcaggccatcaaggacagggacgcggacgcgatcggcgaggccgtgaacgcggtggacgggtcggtcaaggccaaggcgaaggccgacgccgacgcgaaggccagaagggaggccgaggagaaggcccaggccgaacaggaggcccaggcggccgcccaagccgccgcggcccaaacgcaggcgcagcagcaggcccagtcctatggcggcggctactcgtacggcggcggcaccggctacaccggcggcggctacacgggaggaggcacgtacacgccgcccgcgaccggaggcggcaacggtggaggttccgcccccagcggaccaatcagcggaggacacggaatcggcacatgcacggatggctgcgcatcccttcctccaattaagcattaataaagcggaggacacggatgtactactgattgtcctccaccatcaagcgacggtctgattcatcattaacgactatcaataaagtccataagggtcttgtggatggcatgccggccggcgggatcgccggccgtggaacaggatgtgttcatgcggaccgtccccctctcccggaagggggtgccggcggctggtccgatgatgggaaaggaacgaggatgagcgaagaggacaaggtgccgtccccggacggcgcgggcgtggtgcccgaacccgagcctgagacggttcgcaggcgtccgaagtggctggcacccgcggccgtgggttgcgtgctggtgctgctcgccgtgggcggtgtggccggctaccgtatgtggtcggcgcgcgaactggccgaggcgaaggaggcttgcgccgtggcggccgacggggcgcgtggcgcggcgaacgactacaatgcggtcgtcaacggccaggccgccgacgcctcggcggtcaccgtcgaccaggtgaaggacgcgaggaccgtggacgcgctggccaaggcgttgaagaccacggctcccgagtatgaggggtgcttggccggttccaaggccggtctggacgaggcgacgtcgaagctcgacaggcaggccgcctggtacaggacgcgcacgggctccctgtcgaaggccgtcaaggcggtggaatcctcgaggctggacaggacggtcgaggacgcggagaagctgctcgccgattcgaagggcagggtcgccgacgagaagacccgtagcatgttggagcaggccatcaaggacagggacgcggacgcgatcggcgaggccgtgaacgcggtggacgggtcggtcaaggccaaggcgaaggccgacgccgacgcgaaggccagaagggaggccgaggagaaggcccaggccgaacgggaggcccaggcggcggccgacgcggcggcggcccaaacgcaggcgcagcagcaggcccagtcctatggcggcggctactcgtacggcggcggcaccggctacaccggaggcgcctacacgggaggaggctacaccggcggaggcacgtacacgccgcccgcgaccggaggcggcaacggtgggggttccgcccccagcggaccaatcagcggaggacacggatgtactactgattgtcctccaccatcaagcgacggtctaattcatcattaacgactatcaataaagcgcataagggttttgctcgataagggttttgctcgaatttcgggcaagacccttttttattccccggttctcttttccctgtgtttttcctgtgatatcggtgtggtttcccggcctgtgcgggtgggggtcgtggagtccggcctgtgggacgggttccgtgaggggcgggagaggcccgtcctgttgatcaacacagggaggagacccttatgggttttcgtcatgatagggcgtcggccgggcggagtcatgaaccgctcgcgcgtggcgcgcatggggcggggccggcacgcacggtgcttgccggcctggtggccgtggccacgctggccacgggcggcctggtggcgtcgaccgcgtatgcgggcggcgcgggagacaaccgtccgggcggcgcgaccggcggccttcccgcgggcatgttctggcagtacaaggacgacgcgtccggcagcttcggtccggccgcgaacgccgacggctcgccgcgcatcgcgtcggtggaggccgcgtacaagcgtgccggcgtgagtgtggtgaacgacggcgtgaacgacgggccgggggcgatccgcgatacgttgcggggcgcgttgtcgaagtgcgtggccgggttccgtcagcgtcatccgggcgagggcgacggcgactgccgtgtcgtgggcgtgggctcggtcgcgggccagcagggcggcagatgggtgtacaacggatccggcggctattcggcgtccgaatggtactcgtcctgggactcgcaaatcaaaccgtatacatataactatgccggtacacaaagctaccggacctcagatggctttgatgatgatccgtcgaacagcgtggacaagatcgcgtatgacaacatcgcgcgggccggtgcgacgccgaacctgatcatcgtcgtgctggacaagtaccagccgaagccgccggagacgcctccggccccgccgacgaagaaggtggagcagggcacgagcgctgatggcatgtcgaacgagacggtgatctcgacgggcactggcgtgggcggcaagaggatggtcgtccaggatgcgatcgatccgaacggcatggcgtacaaggtcacgggccagaaggtcacggacacgaccaccggccaggacgtgtccgcgaagttcacgttcaacacggcggacgggcagccggccccgaacgatgtggccacggccacgtggaagggcggcgacctgccggaaaggcacacattcgagtaccgtctgaccatcacggtctcgctgccttccacgtcgaaggtcacggacacgccgtccgtcacgtggaacgacaagggcacgggcaaggccgacggccacgggttcccgacctggcggccgaacccggacaagagctggatcctgtaccgtgacggcaagtggcaagccgtggtcgatccgggcgagacgaacaggaccggcgcggacgacatgaagttcctcgacggggacacggtcggctccgcggtgaacggcaccgtggaccccggtctgaaggaggcgcccgccaagctggagctgaccgacgactgggccgccgccgactatctggtcgacccgcaggacgcgtcgaagatccgcgtgttcgcggccgaggccgagcccgaccgcaccgacacggtcgacggcgccacggtgaagcactacacgcagaccagcgtcgcggacatcgcgaacaagggcaccgacgtgaccgacatgttcgacatcaaggtcgagggcaccgtggcgaccgcgaccgcgaaggccggttacctgacgaccctgaagggcatgaggaagggcctgcagctgaccctgctcgtcccgttcaccgtgaacttcgcggacggcaagggcgcggcccgggtgcgcgaggacttcggcaggcagccgggcgacgaggtcacgttctgcacctcgccggacggcaaggagctgaccaacaagggcagccagaccgtgaacgggcagaccgagccgaccaacaagccgaagatctgcggctacgtgccgccggtgaagaaggacgtgatcgcggaatcctcgcagggcggcggccaggagagcgtggacggcaaggtcgtccacccgggccagaaggtcgagtaccagctgaccaccgagccgaagctgcccgccgacctggccaccatggtcacgagcgtggcgttcactgaccagtatgacgagaacctcgtgccggacaagcagaccgtcgagatgatggacctgaacaccggcaaggtcgtgccgaagtcgaagtacgcgaccaggtgggatgaaggcaggcacctgttccagctgaccgtgaaggaccagtcgctgatcggccagtggcgcgcctcctccagcccgcgcgtccagatccgcttcgagggcaccgtcagggaggatgcccccgccgaccacaagatcggcaacaagtgggtgctgaccctgaacaacagcctgaccccgtcgaacgaggtgttcaacctgccgcccgtcttcaacccctcgaagaaggacacccagtccaaggagcagggcgacccgaccgtctcgatcgacggcaagacgatgctgctgggcgacaccggccactacacgatcgacctcgacgccacgcagaaggaccaggcctacaaggtatggcgattgggcctgacggatgatttcgatgacgagtacgtgagcatcgacccgtcgaggatcgagatcacgggcgacgacggcaaggactacaccaacgcattcaacatccaggtgagggacggcgtcgcctacgcgtacgcgaagaccgtggacaccgagatccccgcgaccggcgagaccgtgaagggcgacccgcagcccgcggacctgaaggcctacagcgagaagtccgacaaggaccacgacccgttgaaggacccggccatcgaccagtcgctgctcggccagcactacgcggtcaccctgccctacacggtggtcaaggtcaccgacggctacgtggtgaagaacaccgcggtccagatcgtcaacaacgtgaggaagaagaccaacaccgtctccaacccgttgaagccgatcaacccgaagaaggacgtgaccgtgaaggtcggcggccacagcgtcgacggcaagagcgtgtatttgaacagcacgttcctctaccagctggattccagcatcctgcccgcggaccgcgcctaccagaagatcgcgaactggggcatcaccgaccagctcgacccggcgtacgacaaggcgaccggccagtgggccgtgtacgcggcccgcgacctgtaccggggcggcgaggccatcgccaggaagggcgagagaatcgccggcagcggcttcgacagctcgaggctcggcggcgacatgttcaccgcgaacatcgacccctccaccggcctcgtggacatccaggccacccaggcgtacctggacctcgtgtccgcggacgacgcgcacgagcagggctggcgcgcctacgtgcaggccacgcgcgtgaaggtcaccgaccgccacgagaacgtgttcaccgagcacgtgaacggcaaggacctgaccagcaacatcgtgtggacccgcacccctgacctgaccccgggcatcaagctcgagaagtgggacaagaagtccggctggccgaagggcgaccgcgacgactccaaggacgcgctcgacggcgcgagggacggcgacgtgatcgtgttcacgatcaccaatacaagcaaggacgaggacgggcacggcgcatggttcaaggccagcgacctgaagctcgaggaccacaccatcgtcggcgacggcgaggtgaaggacctcaagtacccggacaactggtccacgctggtcctcaagcccggcgactccgtggaggtgaccggcacgctcaccggattcaccaaggacaggcacaccgaccgcgccaaggtcaccggcaccccgttggtcgaatgccccgtggtggacaaggacccgttcggcgacgcctccggcaagccgtccacaggcggcgaggccggcgacggcgacggtcccaggcaggtgaccgtcggcgatcgcacgctgtgcgaggacacgccagtcgagtccaacaccgacgactggaacggccgccggtcgctgctgggcgagaccggttccgcgatcctgccgctcggcgtgggcgcgctgctcatggccggcctcggcgccgccgtcgtgatggtccgccgccgcaagtcggcgcatgacgacaaggacgcggccctcatgccgcgccgcgccgcctgacccactggggcccgtcccatgcgcgtcgccgcgtggagggcccttttcccggggccggcgtcccgaccgggacgccggcccctcatccatgcaacgacatcgatcactcccctcctgttggggagggggcgggcgcggcatgcggccgcgcccataggagaaggacacgatatgaggaacatcatccgcatcggcgccggcacggaccgccggaaccggttcgtcgcgatcgcgttgggcgtcgccctggcggtcggaccggccgccatgctgcccgcggcggcgctggccgcgccggccacggacgccgcggccgcgagcacgacggccggcgcgaccatcacattgcagggcgcagacggagcaagcctggccggccacacgttcgacgtgtaccggatcggcacgtacacggaccaggtcctggacggcacgcggatcagcagtctcggcgtgcgcggcgacacggcgtcgaacgcgtgggcggccgacgcgatcggcatcgccaacgcgtacgatccaagcacggccgacgacatcggcaaggtgtacggctatgatgacgcgggcaacatcgccaacatcaagatggactcccagaccaggcagctgcgcaacatcagcaaggccctgtcccagtccactcggaagccggccgccatccagggcggcgcgaacctgacgaccacccggtccacgctgacgatcaacgtgccctccgagggcctctactacatcacggacagcgcgggcaacccgatcatggtcggcacgaaatccggcaacgcgaacatcatgcagctcgacgcgaaggacccgcagtggcggaccctgggcgtcgcggtcgtcaaggcgaaaagcgtgagggtcgacaagaaggtccaggtgtcgcgcgacggcaggaccgtcggcaaggacggcaccgcctccgatccggtcggcgtgaccgtcggcgacaccgtcaccaacacggtcgaggtgaccgtgccgaacaagcaggccgccggcgcggtcaagttcaaactcgtcgaccagccgaagggccagacgtacgtgaagggctcgctgagcgtccggctgaagaacgcgccgcagaccgacatcacggccgacgcggtcatctacgacgggaccacgcagaacaacgcgaaaagcatccccggcgacccggctttgaagaccgccgacaaccggcccgcagacccggatctcgcgatcccggccggcggctggggcatcgacggcaggaacatcctcgacaaatactccaacaggacgatcgtcatcacctacaggatgaccgtcgacaaggcgagcatcaccgatccggcggccaacaccgtccacacgtacggcacgttcaccgacggcatccggttcaccacgatcaccgaccaggacaaggtcgacatcaaggcctacgacttcacgctgcggaaggtggacgcgggcaacgtgaacacgctgctcgacggcgcccggttccagatccagcgcaacggcaaatggatgaatctcgatcagaacaccggcaaatggtcggacgcggccgaccaggatgccgccagcgtgttcatcaccggcgactcgaaccatgacgggacggtcgacaacagggacgacgcgagccagaggggcctcatccggttcaaggggctcggctacggcacctatacggtgaccgaaaccaaggagcccgccggctatgcctcctatgcgaagccgagcttcaccgtcaccatcgacgatgcaggcaccgccatcaggttcgccggcaaggatcagccgggcctgaccaccggcatcgacaacaacacggtccaagtcaagaacatcaccaacctgactcaattgccgcagaccggtggagccttggccttcgccttctggctggcagtctcctgcccattgtggggcagtggaatcgtcctcgccgaacgcagcctgaagaaccgtcgcaaggcagtcaatctggctggcaacggtctcgcctgatccaagagagaccatgacgcgggacgtgcgtcggaaacgaaaacccgtcgaacgtcccgctcaataccttttttccaaaaccatgccgaacatgagattcaggggaagagaaaacacaatgcacagcatattgaaacgttccgccgcactgatcgcatccgcggccacgcttctcggcggaggcctgctcatgacgggcaccgcgcaggcggacgggatcgacctgccggtcatgaccatccatccggccgcgagcacatcgtatccgaaggagctggtcaacggcggtttccagacgttcggcaaccggatcgtcgacaaacgttccggcggctggcagtacctctcgttcgtcgacggcaacggcatggccatggaaggctcgagcgagcgaccatgggcgaaggtggacggctgggatgccgtgaaattcggctggaaatccaatgattccgtcagcgggcacagagggatcgtggaagtccaacgctttaggacggccgtcaaaggcagcacgggcaacgtgtggggcgagatcgcggccgccacgcagggcaaatacctctaccaggacatcgacacggcgaacacatccgacgccatgtacacggtccgtctgaagcacgccagccgcaacaaggacgccagggacagcatgcaggtgctcgtcggcgcgcccggccgggagaagccggtcacgatgcgccgcaccatcgccaatgcgggcgacaaggccggcgaggaatccaccacgatcacgtccacgggaaccggccaggacgaccagtgggacacgtacgagggcacggtcctcgtccccaggggacaggatgtcacacggttcacgttcaaaagcgtggccgattcgaacagtgccggccgtcccgacagcgcggaaggcaacctgatcgacgatgtcgtgttcaccaaggcctaccagctcacgtacgacgcgaacggaggcgtgaaaacccggaccagccagatcgactacacgacaggcggtgaaacccggggcaaggtgaagaccgtgcgggattcgcccgcaccgcccgcaggccaagagaagatcgccaacggcgacttcgaatactcggggaccggggcgggcctgtccgactccccgtttaactacgtgagcctgagccggaaatcctactattacaaggattccaggaacgtcaaccaccgtgtcgccctgcccgccggattcgacgcgaaacggttcgcatggaaaagcgaccagaccggcaaggatctaggcaacccgccctacgaacaggccggcgacgtgcaggtgtggaacaggtacgacggctccaaccattacgccgaactcacggccgcccaggccggatcggccatctaccaggacatcgacaccgaatccgacagcgacgtgcagtacatcgtcagcctcaggcacgcgagcctgaacgccagccacctggacagcatgcaggtgctcatcggcgctcccggccacgagaccccggtaaccatgacccgcgtgaccgccaacgggtacggcgacaaggttggcgaatcctccgacacgatcgccaccagggtgtccaacccgaaacccgcggacagggaggactccgaccatacaggccaatgggagacgtacacgggaaccgtgaccgtgcccgctgggcggccggtcacccggttcacgttccgcaacgtgtcgtcgaagagcgcatggaacggcaacctcatcgacgacatcgcgttcacgaaagcccgcaggctcgactatgacgcgaacgggggaaccaaagcgcaggccagccagatcggctacaggaccgacgcgacccaaggcgcggtggagaccgtcgcatccaagacccttcccaccgaactggtgaacggttcgttcgattatctgctggatggcggttgggatactatcagcccggtaggtcgtggcggatacgctgatgaccgtggttggggcaggttcacaagtgtggaccccgctagcggcgaatacatccagaacgccggacagaatccggcaacattcgattccaccggcaagtgggtgaagtggcccggtttcgatgctgcgaagttcggctgggcttcggaccaaaagggcggacagccgcaaggcggagtcgggttgaccgaccggcccaatgcggtcgaattgcagcaggattccgtgacaggcaacacgtatgcggagatcgtcggctcggagaggggcaaggcgatcctacagaagatcgacacgcagcatgattcggacaccgtatacacggtgtgtttcgaccatgcgagcctgtccaaggagcacgcggactcgatgcaggttttggtcaacggcaagcccgtgaccatgacccgcgtcaccagcaacaaggcgggtgacgaacagggttggaccggtacgagcatcaccacgcacgcgaccaacaccaaccgtttccagcatgacggccagtgggcgacctacgagggcaaggtcacgatcccggcgaacacgcctgtcagcacgttcactttcaaagccctgaacgccgtggacccgaccaagggcaacctgatcgacaacctgacgttcaagatcgcgtacaggctgagctacgactcgaacggcggcacgaaggcgaaggccagccaaatcagttccatgaccgagggcaaggcgtccgagaccgacggcaaggtgaagacggtggcggacgacgcggccggttccatcccgtccaacgaaaccgccggcgccgtcaagcaggccaagtcgaagaccaatggcagcgtgcgtctcgcggcggatgacgatgtggcggaatacgctgccaacggcctgccggaccatctggtgaacggcacgttcgattatcgcggcaacgagatcatcaacgagaaccagagggtctacggcaggcacgacacaacctacctcgccataatcagcgcgaagaccggcgtcatcggcaacccgctgcacagcaagctcgacaactgggaccccggtcagttcggctggaaatccaacgacgccaccgccggcgtcgacaccgtcgaggtgcagcgccgcaaccacaccccgtatccgaccaacgcgggcaacgtgtggggcgagatcgccgcagccaagcgaggcaagtacatctaccaggacatcgccaccacgcccggcgtcgtgtacaagtggagcctcaagcacgcgtcccgcaacgcggaccaggacgacagcatgcaggtcatgatcggcgagcccggagccgaggccgtgcaggaggcaacccgcaccacatccaacggcaccgacaaggtcggcgagaagtccaccacgatcaccacgcacggcaccgcgcaggacggcagatgggagacctataccggcacctacatcgccacctcgactgtcacccgcttcacgttcaggagcgtcagggactccaacggccagggcctcgacttcaccgccgaaggcaactgcgtcgacgacctaagcttcgacaaggcgtacaagctctcttacgacaagaattcttcggacgcgaccggcagcgtgccatccaatcaatacggcaaggagaacaccgtacagcccgccaagtccaagaccacgggcagtgtcggactcgcggctgacaaaaccgcttccggcctgacggtgcatgatctgaagaagaacgacaagggcaaggtgccctccagttcgaaggcggattccacgcagccggccgcgttcaaggctccggacgccaaggtggagaccatcgcctccaggtccgcgggcgacgagctggccgtgaacggcgggttcgacaccccgaagtggacgatcgccaaggaggggcagggcctgccctggatctacgtgtactcggacaagggcgtgatcagctcctactaccagtacgcgaacgggcagaagggcaccaagataccgggcctgaccacctcctcgttcgcatggcgggacgtggacgccatcggcggacatcaggccatggaactgcaccgggagaaggacgggaacacggccgccgacgtgcacgcgggccgtacggtcgcccagacggtcgccactacaccgggagccgcctacacgttcagtatccgccactccggccggtccaaaggcaacgcgggcggagtcacactgctcgccggccccgacaaggaccatctcaccccggtcaaactgacccgcaccacggtctccaagaccggagcgaaatacggggacaagaccggcgacgtggggaccgtcgcctatacgcactccgattccgcggacgccacggaaggctcccatgatccgtgggaccattccgacgactgggaatcctacgagggcacggtcattatccccgccgggcaatcccgcacgatgattgcctacaggggcgtcgccaaggacgggaaactgacggcatccgccaatgacagcatcatcgacgacctgagcttccgcctctcctacaagctctcctatgatgccaacggcgggaccaagaagagcacgtcgcagatcggctccaagaccgatggcaccgtgaaggccatcgccaacacttccgacagtctgccggccgaactggtcaacggctcgttcgactatccggccggcctgatcgccggcgcctccaccaaatacccgtgggacgactggaccgtcgtcgacccgatcaacggcagatacgcgcggcacatcggcgtcgataaggacctctgggctccaatcacgggatgggacgcctccaaattcgcatggaagtcaacccagaccaagggaaccgactggcagcagatcgcacagggagtcgaactacagaaggactccaagaccggcaaccagtacgcggaactcgtcgcgggacaggcgggcaccgccctctaccaggacatcgccaccatcccgggcgtgtcctaccgctgggagttgaaacacgccagcctcgacaggacccacctcgacgggatgagcgtcatgatcggcgaacccggcaaggaatccgcccaagacgcgacgcgaaccaccgtcaacggcaacggcgaccagccgggcgacgtcggcaaggtcatctccacgaaggtgcgcaacaaagccgaactgggcggcagctcgaaccattccagccgtaaccatgacgggcagtgggagacctacaccggcacgtacatcgccaccgggacggtcacccgcttcaccttcaaatcggtaagctccagcaacaacgtcaacggcaacatcctcgacgatctgagcttcaccaaggcctacaggctcggctacgacgcgaacggcggggccaagacgaacgccagcaagatcagcgcatcctcgaacggcacggtccgactcgccgcgaccaggacgtccgtcccatcccatgccctggaggacacggacgtgcccgccgactaccggagcttcacgttcgacaccaccagaaccagactggccgacgcccggttcgacgggaactggaccaccacccgggacgaggccggcggcagcatccactggccgaccagactcggcgcatccgccaccctgccgaatacgggcacgtggacggatccggacggtgtcgaacaccggatcaacgcgaccattgcgctgaaacagtggaatggcggcaacatcggacagttgaacaggttcgacgggaacgggaagatcgtcggcgacggcctgttctggatcaacgtcgtctacgacaacaccaaggtgcccgccagcgtgcgcaaggctctgggcggcatcgacacgtcgaaacgcgtcggctgccagtggaccgtcagcttcacgtacgaggacggcacgcccgtgccctccacgttcaaaggcgtcaccggattcaacgacctggacggattcgacgcgcggccggacctgaaattcgagggcgtgcagctgctctccggattcgacggagcctaccggacgcgggacgcggaactcgcatcctacgggaccaacgggtacgcgggcatcaagcacgatgcgggcgacgagtcgaacctgaacggcgcgcagcaggtcagacaccgtctggccgccacttggaccggccccacgttcacctactcgtacgaccttgagaacccgacggaacgcacggacggcgtgcgcatgacgttcggcatgccggtcacccgcacccaggtcctcacctacaaggcgaacggcggaaccggccaggtgccctcgcgcaccgaggccggcaaaaccgaaaccgccgcctccaggatgaacggcacggtcaggcttgcggccgacagggacaccgaaccggagtccggaaccaccaccgacgatcgcaaggtgctgaccgacacgatcgccagacaggatgatgggaccagtcagcggacgatcacccgatccgacggcagcgtgcaggtgcagaccatcgccgacacgggcgccgtatccggctgccaggtgtactatccggccggcgccaagatcaccctggcgaccgcgaaagccgactccgactgctgggattccagccagatcagcaagaccaaccgcacgttctacgggtggagcgcgaacacggacgccaacgacaaggacgtgcccgtcgccgacaccatggaccgcgccaccctggatgcgaacgcggaaacccagatcaccatgccggccagggcgaagaccgtatacgcgttgtgggccatcaacccgacgctcacgtataacgtgaacgcgccggccaccacgaaggccccggacgctccggccagcatgaccgtgccctataacacggcggccgacgacaagtcaggctggaccgtgggcgacaccggcaagatcaccggctactcgttcgacggctggtacaccagtccgacgggcggcgacaagtacgactggtccacgaagctcaccaatgatgtgaccatgtacgcgcattggaccgcgaacggctacacggtgaagtacgacgcgggcggcggcaagggcaccatgggcgaccagaagttcacgttcgacgtgcctcagaatctgagcccgaacgctttcacgcgcgacgggtacacgttcacgggttggaagcgcgccgacaccggcgactcctacacggatgggcagcaggtctccaacctgaccagcacacccaacggcatcgtcaccatgatcgcccaatggacgccgaacccagcctccatcaactacgatccgaacccgcctaccggcagaaccccgggcgggcagggcaccgctaactggaccggccacaccggcgacactcaggccatcggagcgaacggctggacggtggacggctacacgttcatcggctggaacaccagcgccgacggcaaaggcacggcgtacgcgcccggcaccacgtggatcgcgaacggcactctgaccctgtacgcgcaatggacgcccggccaggccggcctcacctacgacggcaacggcgcgaccggcggtaagaccgaccctcagccgggcaagaccgacgagaagatcaacgtccgcgacaacgggttcacccgcgacggatacatgttcgtcacgtggaacacccaagccggatgcaagggcaaggccgtcaacccgggcgacgagtggacgctgcaaggttccagcaccctgtacgcctgctgggccggtaccgcgcaaacccttgcctatcacggcaacggcgcgaccggcggcaacacggctgtacaatccggcaagaccggtgacgagctgaccacaaacgccaatggtttcacccgcgacggatacacgttcgttcgttgggacaccgccaaggacggttccggcaccgcatacggcgaaggcaagaacggcgtcagccagtacacgatgaagcctgcaggcaacgacctgtacgccatctggaaggcgaacccggccagcatcgtctaccgcaacggctacccgaacaccacaggcagcacgcccgacaccaccggcagcacgggagacacggtcaccgtcagccagaacggtttcgaccgtcccggctacacgttcaccggatggagcaccagcaagcgcggcgatccgagccttaaccccggcgacaagcacacgctggaacccggcaccaccaccgtgtgggcccagtggaaggccaaccccgcacacttggtgtacaacagcaacatcggcagcattggctcggaaaccaggacggtggacggtgtcgttgaccagaccgtgaagacgatcgacaatccgttcgaccgtcccggctacacgttctccggatggaacacgcaggccgacggcaagggcaaggcatacgatccgggcgcggactacacgctgaccgcgaacgacaaatccacgccgaagaacacctcggtgctctacgcgcaatggacgatcaacaaggtcacgttgaagttcgacccgaacggcggcgtgggtggatacccatccatcaacacggacgcattcggttcggtcaccatccccaaggatgccaaggagccgaaggtcacacgccctggcttccgcttcaccggctggagcctgaagaaaaccccggacaaggatgagaccctgctgacccccggcaaggatacggtcagcatgccggccgaaggcgaggtcgccgtatacgcgcaatgggagccggccatgaccacgctcccgttcaccggcggcaacgctcagattccgaccatctggttgtgggccggcctcgcgttcctgatcatcgcggcaggagccttctccccgatgatccgactgcgcatgggagccggtagcaaaggccgtcacgccggaacgccgaccattggaaggcattcccggtgagcatggccgtagcgacatcgcgggacgtgtgggagtccatgcgtctcgccgtcgatgacaggcgggcccgtgacaaccgggtccgtctgctcatccgccgttcacgcgtatacgccaccgccgctctcatctgcgtggcattggggctgatactcattggcatgccccgaatccagcagctcatcggagatagggagaccgacgctcaggcccgttccgtcagtcagtccgcatcactgtttcctgagggtagccgtcagagcgcgatcaaatcagcaatcgaatacaaccagcgactttacgagtcgggacaacctcaaatcggcgaacctgtttttgatggaaaagtcaggggaaacttcgagggcgacgacgaataccggcgtcaactgtccgtcaacgggttggacgcgatgggtgaactgctgattccgaaaatcagtgtggatctgcctatcatgcacggcgcgagccaggatgtgctcgaacatgctgcgggtcatctggctggcacgagtctgcctgtcggaggcaagaacactcgtgccgtgattaccgggcattcgaacctgaagggggcgaccctgttcacccggctcggggaactcgatgagggggacccgttctatatcaaggtcatgggcaacacgctcgcctaccgggtcaccagcaaacgcatcgtctcacccacggaaaccaaggcattgcgcgtccataaaggcaaggacgaggtcacgctcctcacttgcaccggtcagggaaacactatgcgtcttctggtcacgggggagcgtaacagcatgcccgaccaggctcctttgccgggggatgccccgggtgatatgaagcaggctgctcttgtttccggtatcactgtgacgggggtgttggctgttggtttttcgctttgtcggggccggcgtgtttcaggcaggcacgtgtcttgctgacaaaaaaggaggtaaaagtttgcgatagtaaaatttgtgctactatttgtaggtggaaaacatacaacgcctcccaaggaacacaaaccccaaaagaggcacgaccaaggaaagaagagatctttcatgaaacgcagcaacctcaccaagatcgcagtggcaagcacagccgtaatggccaccctcgcctcgcctgcaatcgccatggccgacgaaaccacaaccacagacaaccagaccaagcaggccatcgcacaggcgcaggacagcgtcgcacaggcccagcagagcacagtggaagccaaccaggccatcgcacaggcatccccgaccggcgtgaccgaagcacaggccaaggccgacgccgccgcagccgcactggacaccgccaagcagaacctcgacaacgccgccgcccagcagcagacagccgcaaacaaccagcagcaggcgcaggcgaactacgacgatgccagcaaggcccagcagcaggccgcacaggatgcgaccgacacggccgacaagatcgccgccgcccagcaggccgcgaacgacgcttccaacgccatcaacgacgccaacaaggccatgcagcaggcctccgacggccagtcgaaggcagaagccgacaagcagaccgcacagaccgcgaaggatgaggccacggccgaatccgcctcccatcagaaggacgccgacaaggcccagaccgatatcgatgcggccgacaagcaggccacggacgcgcagaagaaggccgatcaggcggataccgccatcagtgatgcgcagaagaaggccgaccgggccgatgcggacgcgaagcaggccgcgagcgacaaggcggccgccgagaaggagctggccgcggccaagcagcagcaggccacggcgaccggcgacaagacgaaggccgacgaggcggtgaacgccgcgcaagccaagctggatacggccaagcaggccgaggccaaggcgcttgaagccaagcagaaggccgatgccaaggtcgaacagctgtccaaggatgatggaggtctttccgacctggccgcgaagctcgaagcggcgaagaaggccgcagccgatgccgccgccgcccagcagaaggcggaacaggcgcagaaggatgccgacaaggcggtgtccgactcctcttccaacgccgaggcgaagcagcaggccgccgccgacgccaagagcgaggccgacgccaagaaggaagcggcagacgaggctcaggacaagctgtctcagggcgcagtggcctacttcggcgacaagggtgcctctcaggcagtcaaggttctcaccgatccgaccgtcaccgagtatcttggcgccattcataatggcgccaagggtgatgcgaccacgttggacaacatgatcgaggccctgaagttcatccaggaagccaatcagcttcgcgcgaaggaaggcctgcagcccctcaaggtcagtgacaccctgatggcgcaggccatggcggatgcggattatgccaacaacaacgtgaaccatccacttcaattccccgccagcgaaaacctcgcctggggttacactgatccctttaagggctggtacgacacggagaagtccatgtatgagaaggacatgtccgacggtgtcctggattgcaaggcctcggacggcaagcccgtcaaaccctgcgcttatggccattacaccacgctggtcaaccccgatttgaccctcaccggtttcggcgtcagccagaacggcaacatcacgggtatcggcgggaacacccatagtcagctgttcaccgaaaacgctaacggaatcggctccgacgcgggccgcatcatggacgttgacgcatacctggctgatttgactgcctaccgtgattccctgaccggagccgacgccgcataccagaccgcattgtccaagagcaagcaggccgcacaggacgcttccgatgcggccaaggcgctggccgccgcccagcagtccgcacggaaggccgctgaggaagcccagcaggccgcgcagaaggccagggatttgcaggctgccgccgacgaggcgcagaaagcgtatgacgaggccgtgaaggcgaacgaggacaaggccaaggcgttggaggaagccaggaaggatcaagccgataagaacgcggcttattccgccgcccagcaggccaccaaggaagcccggtccggagccgccaccgccaccgacgcccagaccgcagcccagacggcagtggacaaggcgaacacggcagtcgccgccgcacaggcgaagatcgataccgccgacaagctggcccagaccgccgccaagaacaagacggatgcggaagccgcgatcaagcaggcgaacacggacaagacgaaggccgcagccgacctggccgccgccaagaccgcgaaggccgaggccgagaaggccaagcaggccgcgctcgatgccaagaccgtttccgacgcgaaggttgaagccgccgccaagcaggtcaaggccgccgacgaggccatcgccgacgccaaggccgcatacgcgaaggcgaaggacgacctcaacgcggccaccggcaagctcaacgacgcccagaacaccatctggcgtctgcagaacgccgaggagaacctcaagaaggcgaacgcgaagctgacggaagcgcagtccaagctggatgaggcgaacaaggccaaggatgaggccgacaaggcatacgagaaggccaaggccgactatgacgccaagctcgccgacaagcaggcgtccgacaaggagctcgccgccgccaagcaggccgaagccgaagcccagaagaaggccgaggaggaagccaagaagcagcaggaagcccagaagaaggccgaccaagccaagaaggatgccgaagccaagaagcagaaggccgaacaggccaagaagcaggctgcaggtgtgacgaacaatggtctggcctccaccggatcggacaccaccgcaatcgccacgctggcggcgatcatgaccatcgccggtgctggctgcgtgctcctgcgtgtacgttccgccaagcatgccgatggatggcatgcagtcgaggactgattctcaccgcaccaaacgtgttttgcccgccttcgacccgaaacaggggagaggcgggcaaaaccgtattcccacataccgaagcaaaacggtagcttcttttgttactatcagaaaaaagtcagtgaattgcgtgaaagggtctggctatgaacgatgtaggccatgcgccactcccaggcgacgtgctgctacaccaatacctgcaaccgaacaacatcaccatgtaccgtctggcgaaagccatgaacctgccacaaatcaccgtcagtggaataatacgcgggaaaagacgcatcaccacaagcctcgcataccatcttgcctacgtgttgggcacgtcaccggaatactggctggaattgcaaatgcactacgatattgaaaactacgacaaattcgatgaaagcggactgacggccctcattgataatacggtcggcgacactgtccgatcagaacgatgacgagcggaagaatccgctaacgccagtttcgtccatgtccactttgacggcctcgattcctctctttgtttcgtgttgaacagccacgcataacgccggtcgacgcgacgctccgtatcaagcccgaacaacccgacgaggttcacgtcgacgatctcgtcgtacaggttgccgtactagttgaggatgacggtgcgaaaacggaaaccatgtcggacgagacggcggaacggatggcgaggaccctgacatcgattaggagcgtgcgtgatgagccgtcaattgtccgagaaacaggttttggagatgcttggcatccctgatttcaggcatctgtcgaaggacaggatcatgtccttcacctccgcgttgccccagatggaacctcaggtcgccattgccgcattgcagcaggtgccgcatttcgcggacacgtcactggagatcatgcgaatctacaaggagacggtctcccagacgctggccgaggaccaggagaacgtgcagtcgttcaatgcctcctgcgacatggttctcggattgttggagaccctgtcgcagaacgacgatctttcattcgagcagaagaacgagctcatcgacaggatgatggccgtgctgaagatgaaatcggacaaggacaccgagaccaagaggttcaagttcgccgtcatcggtgccgtggcggtcctcggctgtttcctgaccggcgcggttctggcggctttgggaggaagcagccagatcagcacgggcgaggatgacgatccgtccgaggagtgacctgatccggccttctcatccccaatgcgggaacaggtggcggaagagcctctcgccggcctcctgctcgtcgagcacgcccatcgtgtattcgtcgacgatgaaccgggtcctcgccatccgttccgccgtctcgtccgacatggtttccgttttcgcatcgccttcctcgatgcgcgtggggacgcggacgagttccagatcggatatcccctcgggcatggtcccgtccggcagacatacgacgacctcctctcccccgccatcgagctcggtcagcttgcagatgccggtgccgtccaccgattccaggtattcgcccagttcggggatcccgtcgcgtgtgaatctgcacatgcgcagcccctgcccatccattgatcccccaatcatgccggatgcccggcatatcccgtcatcatgctacttcctttcgtccgttcatgaatcagacacgccatcatcgccatccggagacgacggcccgttgcccggctgtcggccgaagatggattccccgtcgcccaacgctcccagggatcgcagctcgccgtcgaaccggtcgcgttcggcttgttcgcgcagttcccgctcccagatctcgtagtcgtcggcgtgcagaccctcgtcgggcccgaccttccagtcgaagcgtcgcagccggctgatgccgggcatgacggtgccgtccggacgtgtcaacggatggttgacgacgaccttgagaccggccggccactcgtcggtgacggcgaacccggatccgtcgcccagcgtctcgtattcgcccacgagcctcctgccttgctcgtaccattcgcacatgtgcagcgtgaacgacccgtcctcatgctcctcgtacatgaccgtctcctcttccgcaatcctagagctcgatgtcctgggcgagcatggtggccgcgtcgtttttgtgttcaatccaccatgccgcgtcgttcatccgcagcacctgcctgcgcagttcggcgaacgcgtcacggtcctcgatgcgcgcgtggcgggcgagcacgtcgacctggctgagggtgcggcgtcgtatcggctccgcccggtcgcactgggatttggagccccacagttcgcagaacccgtcgagcctgttgcgctgccgggacgcgatgccgacgcaggcggggcatgacgcccgttccgcgttccttacccgctgttcgacgaccacgtacgggccgtccacgttgatccgttcctggtgcccgcatgcgtgcgtgacgaatctccaagccatgtcctaccgccttcccggaacaaaaccgaatcaatattcgaacaaatgttctattaaggcggggacatgcacccgtttgacgcccggcgggaacgctacgaccgacgcggggcgcgccgcgactccggcccgtattccgacgatgtcatggtacaatttattgtacaaacaggaggtgcgtgatgacacaggccgtggcctacagcaatttcagggcgaatctcaagacctatatgcgcaaggtcaacgaggacgccgacacccttctcgtgaccaacgcggacccggaggacaacgtggtcgtgatgagcgccgacgactacgattcgctcatggagacgctgcgcgtctaccagaacccgtatctgagcgacaaggtgatgcgcggcatggcgcaggtccggcagggccagacgatggcccacgaccttatcgaagcgggcgcgtgatgctgctctgctggaccgaagacgcctgggccgactacctgtactggcaggctcaggaccgcaagaccctcaagcgcgtcaacacgctcatccgggacatgcagcggaccccgttcgaaggcatcggcaagcccgaacccctcaaatggggcctgtccggcgcatggtcgcggcgtatcgattcggccaaccgtatcatctataccgtcgccgacgacaggctctgcatcctctccgcgaaggaccactactgaatgacatgggacggaacggcctgtaccaccttatcgacgttttcggtcgactcggctttctctgacaggattcgctggcagttcctgagccggttccaataacgctttcgccaagccgcgaacaaccccatcgccaatgtcaacacgaacgtgcacagccataacacgacgccatccacacccttcatatccttcaatgggccgaacccaaatacggccacagcagtggggacgatccctcctaaatcaagcaccacactcgttgccttggctttgatgtcgtttttcctgatgaattcgggaagataccgtttgacgcgggatcccagtccttgatgttgtcgaatgttatcgattcggttatttcgttcttcaggaacagggtcgaggaaatcacgtacctccattccagcagcgaggtgaagccggcaagattggaaccgatttttccatcgggccagcaatatgcgaaggacagtgcggatatccagagcatgaccacgcatatcagccagataaacgtatgtatggacccatctacgtaataaagaaaaccggggagacccattccgacgaagaagggtatgggcgcaagcatcagatgcattgatgatggattcgcatgctttaagacgaaaccgcaatacgcatagtcgcagtagacaaggcccaaggaaagcagccacaacgccattcccatccccgagaagggcgttcccttccctccatagttcgcgcaggccattgccgctcccgcatcccaggacatcagcatggacgtgagaaagatacatgcctcgaacttcttcgatttatcacggccgagcatgggaccgaacacttcccctggaacgacagccaaggctgccgacatagctgccgcgactacgacgccgccttcattctgatctttccagaaaaaatgcactcctgtgcagaaacccgccagagctacggccacgtccagcagcagtaaccacaatcccggaatattcttcttcatgctctcgcccgtggcgttttcgcctccatccgaatttgacgtgtttgcattcataatcaacttcccttttctcccatcggccgtcccaaccaccgtatatccgtgatgatccgttttcacgtgttttgttgaatttattaggacatcgcggcggcgcttgtgccggccacgaacgcgagcacgacgaatgtggtgaagatggggtcccagaagacggtcacgaggatgacgatcagcacgatgttcagtatcacgccgacgaggtttcccggcttgtccatgtcttttctgaacagatggactcccatgcagaccagcaggattatgaacgcgaatccggtcagcaggaaaaaccagtaccagggttttccggcggtggcgaaggcccgttcgatcagagatccgttcatgacatcatattgggaatgcagccagtgcttgtagaatgccagcgcgatgatgtaggccagggatgcgaggacggtggctttctcttctacggggatttgtctgatcacgttcctgattctagtgaacgatcagtcccgccgcgaagacgatcacgccccagatgaacgtgagtcgtgcggggtccgccttgtcgccgtggccgacccattcgagcgccgtcttcatgccggcgagcatcgtgtgggcgagcatgaggcagaacaggaacacggagaccgcgagcagcggggtcaccgttttctcgaccgccatattcaccattcccgcccccagaaggacgaacgaggcgacggtgcaggccacggccgccgcatccgcgcggcttcttttcccgtgtccgatcagcgggtatacgcataggcagcagatggccagcaggacgagcggtgccagggtcagcgcggtttgcgcgtccgcgtcggagaccattctcaggtagtccgttttcctcaggcgcggcagtacttggtaggagatgaatcccagcacggccgtcgccatggcggcggccatcccgacgcgcagcagcactcccttgcatattgccgcggcatcggtgccatgttcctgctccatgcccttgctccttccgttcgttgtttccgtatcggttttcctcggatccggttcccggatcgtttttcttgttccgttttctgacgataaccgggtttcccggctcgggcacgttcctgttcatgcccgagtcctcgtggctgccaccgtggccgccggccgttatcggcggtcccgctggtggtgtccgtggaggcgtggccgcttgcccgtccgtcgcgtcttccgttttccggttcaggtgtcggcgggctgattgggagagtgtgtcatgctgtcggttctagtgttgctgctggtggtggccgcggcgtcgttcgcgtatcgcgcgttctggatgctgcgggcccgtccgtcgtcccggtatgtggggagccgtttccgtgacgaggtggtggcgatgagccgtcgccagcgtcgtcgcgcgttctggggcaatgtgctgctgtgcgtgttgtgcgtggccgcgatggtgttggtcggcgtgctggtgggcggcatgggcggctcggtgtgaccgtccgtcgtcgtttcgcttccggcccgtcggcgtgtccggcgggctttcgtcttgtgtgtgggcctgatcgtcggaggttggtgtgatgtctggttcgactggggatgctccggtgttggagggagaacaccggttgggcgagggcatgcgtcgcggcgtgttctgtctgggtctggtgccggtggcgacggggttgacgctgcgtgaggcgatgtggatgcagtgttgtctgacggcgggtgtggagcccgggccgatgcccgcgcatgcgttccgtcgcgccgaccggcatgcggtggaggacgcgatgggcgtggccccgggtctgatgcgcgcgatggccgcggatgcgaaacggcgtcggcgcatggtggacgcggacgaggaggggcgtctgcccctcggctcgccctcccccgtggacatgatgacccgtgatttccgcgtgcggccggtcacggcgtggcatcagaccagcacggggcgtgcgggggtcctgtccacgctggtggcggggtcgggggcgcctcgcatcgacgggccggtcatcggcgtggatgtgctgtcgcgtgagttgtggcggttcgattcgtgggcgacgtatgacgcgccgggcgttcacggcccgcatatgacgaccagtccggacgtgttcatctgcggcctgcgcggcaacggcaagtcgttcgcggcgaaggtgatggcgttgcgtgagatcgaggcgggccgtcatgtgatcgtccagtcggatcgcgagggcgagtggggccgggtcgccaatcatgtgggaggccaggtcgtctcgccgggcggcggccattatctgaacccgttcgcgttgccggaccgtccgtccgccggcgaggacgatttgtggcgtcaggaggtgctttccgggcgcaaggcggcgttcatgagcctggcggaggcattgcgcgaggatggaggcccgttcccgctggatcgcgacatgcaggtggtcgtggaccgtgtggcggtgtcgttcggcactgggccgatgacgttggaggcggcgttggaccgtctcgcggaccgttcgtgggtggatggggagtcgccctcgatgacgggtttcgagcatgagccggcgttggcgcgtgcggcggcggccgcggcggctcgcgtgtatgcgccgatggtgcgtggcggcaccctgtcgggcatgttcgacagggagtccacgatccggttggacccgtcgagtccgatgatcgtgttcgacacgtcgagtccggcgttgaacaacgagcagctcaagcgcgtgttcacggcggcggtgagctcgtggatcgaccgtctgctgcaggggcgtgacgggagacggcggatcgtggtcgacgaggaggcgtgggatctgctgtcgaacgcgcgtctggtggactcgttgcagaccagacagcggtccgccggccattggggatgcgcgacctggctgatcgtgcatggcgtgaacgacatgacgcatgtgttcggcgagggcagcgagctgcgtggccgtgtcgaggagatcctcaaccagatgcagacgaagatcatcttccgtcagggcgggtcgaacatcgacatgctcagccggctggtcccggatctgagcgaggacgagcggcgggtgattcccacgctgccgcaggggctgggggtgtggagggtcggcgcggagcatccgcgcatggtgcgcgccctggccggtccgaccctgtcggccctgttcgacacgagcgacctgaggtccgcggcctgaaccgcatcgtttttgttgtatccgtttctccgtattcgtttctccgtattcgttggtgaggaggccgctgatggcggatgtgtccggggatcgtccctggtatgaggagctggcgcccgatctggagggcgatgccggccggggcgtggaggggtcgcgtgtcgattcgcgccgtcgggtcatggccgtgtggcgtgggttcgaggactcgcgtgcgggcgtgtggctggcggagcatacgcggcttctggccgccctgtcgcgtgaggggtcggtgctggtgcgtcgtctggccgtgggcgttctgctcgcggcgatggcgttcacgctgctgctgttcgcggcggcgggcggcgatccggtggccggcgggctgctggccatgcccttctggatggccgcgttggccgcgtgcgccgtgctgtgggcgttctgggacgcgtaccgtgattccggggagcggctcgtagatcgcctgtcctcggctccgggcatggccacgcgtcgtcaggtcgcggccgcgtgcggggtgcgcgaggtgatgcgcacgatggtgccgagcgtgctgccggccatgctggccgcggccatgcgggagcgtcgcatgggcggcgacccggtgtggccgaggccctggcaggcggccatgtacgtgggcgaatgccatcacgtcggtgtctggctgtcgttggagatgcacgcgtacgtgctgggaccgaccaggtccggcaagacagtgacggtcgtgatccccgcggtggtggaggcgcccggcttcgtgctggccacgtcgacgcgcagcgacatcatctcggcgacccgtcgcctgcgggagaggggtgtggcggatccgtcgaacggggcccggtacggcggccgtggccgtgtccatatcttcgacccggaggggttgggcgcggcggatccgctgacccggcacaacatgcgttggaccccgttgcaggggtgcgaggacccgaccacggcgatgcgccgcgcgcagaccctggtgggtgtgggcggattgggccaggggtcgaacaacagggagtggggcgtgagcgcgggaggctatatccaggcgcttctgtatgcggcggcgatcagcaacctgccgatctcgaaatgctacgagtggtcggtcagcccccgcaaggcgctcgaggccgcggacctgatccgcgagcatacgggcgagcgggagatgctgcgctgggcggacacgatccgtggcctggagaccatggacacgcgccaacggtcgagcgaatggttcggcgtgcgcaacgcgttcgcgatcctcgcggacccgaaggtgcgttcgacgatggatttctcgccgcgcgacccgcgtctgatcgatccgaggcgcatggtcgaggatcatgacaccgtgtacgtgctcagccggccgaaatcgcaggcgggcggaggcgtgaacgcgggcctgttcgccgtgctcctgctggacacgttccaggaggcgtgccaggatctcgccctgtcgcgcgaggcgtcgggacccaacctgcgcaagatcgagccgccggcccggttcgtgctcgacgagctgagcaacatcgagacatggggcggcctgcgcaacgcgatcacgcagggcggcggcaacggctatcagttgctcgtggtcgagcagtcgcgcgacatgatggcgcgcgactacgaccgggagaccgagcagaccgtttggaacaactgcaaccggatcatgctgggcggcgtcaccgaccgggacagcctcgaatggtggggcatgcagatcggccggcatgaggtcacccgtttcgagtccacgtggaatccgggacagggcccgctcggaggggtcacggaacgccgcggcgcggaggagaccgtgctgccgtgggagctgagccgtctgccgcgcggatggatggtcgtccagcccgtacgcgaggcgccggccctggtccgcgccccgcatttcatggaacgcggatggtggcatgacgcgaaaggagacaggtgatggacgacacccgtgacgaggtcggtgagatcctggccggcatgacgggaggccggaccggtacggccggcggcgtctcatcccccgtgccgccggccgcggactgggcccgtgggctcgacgccgcgtcggcgtcggccgcgcggctgaccgtgctcctgtcggacgtgtacagggcgcatcagggcaaggacccgtcggccagcctggccgcgcagatcgagcagaccgtgcgcaacctgaccggcgagcctccgcaagagccggaatacgggccgggcctgtggacggcgatgccgcaacgctcctgggagacgatgggcatggcccggccgatcgactggaccggcgcgccctcgcgcacggagatcgacctgatgacgatgcacgcgatccgctacggcgaatggctgtgccgcacgttccccacatgggagcagacgctgcccgcctgctggatcgagcacgacgacgtggtggccgaggtgttctccctgaaatgccatgcggacctggccgcggcctcccccaacggcggcatgtacatgccggccctcatgcaggacatccaccaggcccttgcccgggtcaaggaatacctgacggcggccggcacgggagaatcctcccacgcgcatcacatggacggcgaacagcatgcctcgcgccgacgcgcccgggaggtcgaatacgagtcgtggcatcgccggcgcggcggatggaagacggaaccggcgttcaccggccgttggcggggcggcgaggatttcgtctcctccacgctccttgcctatgggacgcctccctcgcccgcctcgcatgacgatccctccgccgacgtgctcatggccacgctggcgggctgcgaggaacggctggacggctaccggcgttcccgcgacggcatccgccgcatgcccgacgggccggaacgcgaccgcctgtcacgccagctcgccgcggacaccgacggcgatctgcgggaactgtccgaccggtggcgtgactggaggtccatggagctcgcggcccgcgaccggctcgaccaggccatcgcctccatcgaacgacggctcgacgaccggaaggcacccctgtcccatgaggaggccgaggaggcgcgcgcactggcgtcacggggacgcgccctgctcgacgaggccggggacccgcgttggaaccccgactcgtaccggccccgggacccggacgaggagctgaagctcgcgaaacggctcgaaggcatcgcccgtgaacgggatctcgattccctggaacagctcgaccggctcacggccacgatacgcgcgacgatcggcccgaggggaggcatgcgcccatgaccatgccggacctgttcgaacaactcgactcccctgccgagaccggcgacgattggatccgccgcctgctctcggaaccggacgagactccctcccccaccccggccgccggcgacgacggcaccgataccggccatgagcccgatcttccccaagaggaggaaaggattgtcccgccgcaggcctcaggaccgggggccggtggcgatgtgacggctcccccgcctcccggcgcgcatgcgatccccctgccggcatccgacgacacgtcgccatccgatgacctggatgacatgcaccaggacgcgattccgggattcggcaccgatatggatgccgatgagcccgcccgtgcgggccatgccgtccggatcgtactgacggtgctcgccgtggtcgccgccgtggcgctcgtcggcgtgatcgccgccggcgccgtcaccgcgtccgcccgccacggcgcggaacaggcgcaggccgtgctgcgggagaccaatacgattgcgactcggttcgtcaaagcccacaaggcgtccgacctcgccgccgcgaaggcatggagccgtctggacaggcggatttcagacaacgcgaggatactcgacgagcccgccgcccggctgtccatcagggatgctggatcgttgaagaaccgcgcgggcaaggccaataaggacacgaacacgctggtgtcggcggcgaggagggccctcgccatcaaacaggaggccgacgcgcgcgaatcgctcgcgaaggcggtcggcgaggccaccaagctccgggacggcgcgaaacgcgacgacgacaccggcaaggccatcgacgatctgacgacgatcctcgaacgggccgccgagcccggcaaggacgtcaccgtcaaggagctcgaggatctggcatcccgggtcgagcaggcgaggaagaccctcgaacaggccatcgccacgcaggcggagcatgcgaaggccaagcgcgcagccgaggagaaagcggcacgggaacgccaggagagggaacgacaggccgaacagcagaccgtccccgacccgacgccgccacagcagcaacagcaatggataccccaataccagtcgggacagtcgggacagtcgggacagtcggggcaatcgggcggaaccggctcccagcccggcaacggctggagcgtgccggcccccagcgacggcaacggcctgcccggcaacgatcccggactatagcccatcatccattcgaaaggagcaccatcatgacggacgagacaccacgcaaagacgagcacagggaacgccagggccttctcggccgagcaagggaccgattcgagcggatggagccgaaacggcaggcgctgctgctcgccgtcgcggccgtaatcgcattggcggccacgatcgcgctcaacccgttccaggccacgccatccgaccagaactccgcacaatccgtccgacaggcgacggatgccggcaaggacgagaagaaccagtcccggacggacccgtcttcgggaccatcggaattcaccggttccacggaggacatcgccaacaaggcccggtcgatcctcaattccccggacggcggcaacatcgacacgttcggccagacgctcatccgccacggcgacaaggacctgggcaacgcgaccgacctgttcgacgcgatcggccgacaggagaaggcatccacgatccgcgcattggccgacgaatggtatgcccaggcgttgccgaaggccgccggataccggctcgacgatctcaggtcgagcctgcccaaagcggaacatgccgtggacaggctcaccgaccccacgccggacgactgcacgggtctggccaaggccgcgaagcaggctcgcgcgttggtcgacgccggatccgacgactacgacgagctcacctccgtgcagcagaccctcaccaaatcgatcagcgcatgcaccgcgcacatgaccgtcgaccagatcgatcgcctgttcccgcaggacggcccatcggtcaccatacccgacaccgggaaggaggagcgatgacggcggacaccacgcgagggtcttccgacagagccggtatccgtctcggcatcggctcctgccccggcatagcgaagatcctgccggccggcatccgaggcatcacattgcccgacggcacacgcgtgcgcatgctgcgctgcgtgacccgggagggcggcgtcgacatccccgtcgccctgatccccgccaccggggcggtccacaaccgcatgctcgaagccgccggcggccagatcgtcgagttcgccggcaggccacgtctctaccggcccgagacgggcggccccatcctcgcgttcaccgtcaccgacctgcgcatccgcgacaccggcgaggcccgcatgctgcgcgctggacatagaagatagtcagccggttttcagccccgatattgtgcgcacgtccggaatttccatgtcgatctcatgggcattagttttcccgcgtaaccgcatcatggatggcggaaagcgcttcatccggggtctttgccggataccgtagattcgggaaaccgctgcaactaccgacatacattttgtattcgtcggaccactggacttggtacgagttacggtcggcgggctgtactggcttcccagacgtcttcgcccatgtggaggacggcttctccatccacatgtcccatacgcttttcgtgtatcccgtgataagtgcgcccataaccacgccagcaagtaccttcccaaaaatcgcggaacactgcccgattgctcctgatacgatgataagtaaaggataaaacgtcgttttacggaacttcaagatatcgtcggcatcacgtcttcgcgtaatgctgaaaatgaaactagccagaccgggaataccgagcacgcagaacagcaacgccatcgcctgatcctcttggaccgcgccgcccgttctcgcataaagaagcacgccaactgcacagctgcaagcgaacagtaactggattatctgatgcatgagcaacgccatccttttcggatcgctcagccacagcgcgacaacaataatgataagagccggagtccctagacgctccatcaacggtctcccccaaggaaaaccaaacagttgctccaacaaggcaaccacggcgacggcaaacgccaagaacattgcgataataaggagaacaccaccgatttgagagagtatctccctaatcgagggctttacacgtgactttttctttgtgccctcaatatccggtgtgcttgccaattgtttcttgaaccgcatttctccatcacctttcttctcggttttccgaacggtcggttccgccttctcaattacattggatgtcgactttttcatgcctgttcgcgtcgaaatgtctgcttgccaccactgctttgcctgccccataagctcggatatgaatacagacatgatgactgtccccaatatcgcaagcagattgccatattcattgcgcctgtgtctcataattactctccatcaacgaatcggtttgtttctgattccacgataagcatgcattccatgccacagatcattttcattgaatctcgcatacggttctgtagaatgccctctgtggcgaagacggtgataagggtcatattcgatgacgcgacggctgcggaagggtttctcgagcgctgccgcggcgaagggctgaatgccgtggtcaaggacgcgcgtccgatcggcacggtgaagcgcaatgggcccgttgttctagaacggtgccgggccggggaatcatgcctttggcgaggccgaccgattggtctagaagccccggtgccccgcgtgcccgtccgccgtcgagacgaaccgcacgacggatccgtcgggcgagtcctggacgaattcctctacgagcttcatttggggccggctgatgcctatggccggatcgggaccgacggcgagcacgggtgccgtatgggacgtggattcgacggcaagactcgcatcatgggtggtctcctcgtcatccagccagacgattggacggccctgcgccagcgcgtcgactatggtgcggcgcttgcccgtccagatgccctcccgcgtgacggggttgtaccagtggatggtcggccagtctacgcccagcgcacggttcaattgcatggtctccggctgccaggtgctcagccagtacttgtcagcgtccaacgcatccagacggaccacgagttccatgttccaccggattgtgaaccgtcgtcccatgtcgcgaaccagcagccgttccttccggtcgggacggaaccagttatccggcgcatacctgacgcggcgaggatcgttgggcctcatccattcgacgcatccctgccgacgcatgaccttcgcgtccgggaactggttgatcacgccgtcgaagtctacgaatatcaggggcttgcccatccgattctccttatggtctcgtgtcgttggcggcgatgcatgcggccatgcgtttcgtctcctcctcgatctcttcgcacgtccatttatggggttcgatccatggccagcccatcttctcgcatagttcgcggcgtgattcgtccagg

SEQ ID NO: 703 - DNA, 2530794 bp, Bifidobacterium longum (residues 1,265,398-2,530,794 of 2,530,794)
  source 1..2530794: mol_type = genomic DNA
tcggtgccgtccagtccgatcatgctgctgttgccctgcaacgtgtcgaagcctatccagcccgattggtcgggcccgtaggtgacgccgccgtacacgtcgaccaacggttcgatgtcgtcggcgttcagatgtcgccacacgtgcccgtccgggatatgtgcgtatccctgccatgcaaagaacacgtcgttggctatgatccgccattcgacgccgtcttccacgccttcgcgcaccggttctgccatccacggccgccattcatgcccgctcatcgccggtcctcttctctttgccgggtttcctccgggttggccccggctgtctttttgttatcggctcaggcgtcgtcgccttccgtttcgtcttttctcccaatcatacgggtcgcggaccgtcgccgccgtcatccggggtctggggtggaaccggtgccggggcgggcatcgggtccgggaaggccagtgcgccggtggaacggctggccccttccgatcgtcttttttcctcggacgtggcgttgcggggcggcacgaagccgtatccgagtatgaaccgttccgacggcgtgacgcttttcaggtcctcgtcgttccatcggtccctgacgtatgggttgcgttccggttcgctctcgcatcgcgtctcgatttcatgccggtccgcccattcgtcgatgtaggtgtagcggagcatgccgggggcgagggtctccatcatggtgcggtagtagtccctctcgttcagcagcgtgtccacgaggtaggcgggttgcgagccgaaccggcgcagccctcgcgtgtagtagttccggttggcgtcgcggatcaggggcggcacggcgtccaggcggagcatctccttgaagaggaccagtcgtccgatgcgcccgttgccgtccgagaacgggtgcgtggtctcgaacagccagtgcgccctcgctgtctggtatgggtcgtccctgagttccgcgaacgccttgaacacgtcgttcatggcgcggggcacgtcccggggcaggacggtgtggatgccttcgatggggctgatgacgttcggaagcgtcttccatccgccgacgttgcgcgaggggtcggtttcctggctggtcccgtgtttgaggatcgcgtggagctcgcacaccatggccttgtcgacgggttcgtccgcgaggtcgaggatccggtcgaacgcgcggaaatggttcacggtttccgtcgcgtcgtccagccgtatctcgtcgtcggcgttttcgggcagcagcgcgccggtgtcgaacagctgggcggtctgttccggggacagcgtggatccttccatgtggttgctgttgtaggcgaacacgagctgtgtgttctggtagaggccgtgcgagaccttctggtcgcgttccgcgcgcagccagtcgaccagtcgtttccgtgtttgcttcgccatggcccgttcctttcctgtcgtcaccatcgtagtatgcgtgccgccgtgtccaggctccggaacaggggctggtggccggcgaggtttcgcaggagcgtttcgagctcggggatgggcaggtatcggctcgcgatggtccagacggtcgcgacggcgatgagggtgagtatggcggtgacggtgatccacaggatctgcctgatgagtccgccgccggtggtggcgcggccggtgacgccggcgagcaccgtgagcgtgacggcgaggacgatcagggtgccggtgtcccatgcggccagggtccgggtcattgcgtcggcccatcgggcgagttgttcgatgatggttcctgccgtgtcttccattgcgggttcctttcctccatggctgcggggttccgcgtctccacgcggggcttcgggttttccggccgattacggttggccttccgggttttgccggggttgacgacgccgcttccttgtccggtgatgcgtgcgtcgaggttgcaccagtgctgttcctgccggccggaccggcccggcggcctttgcccgatgggctggtcggggtcgtcgatgtgccacatgtcccggtagacggccacgtcgcgcagcaggttgtggtcgccgtgcttccgcgccgtttccatgacggtcctcgaccagggctgttcgcccgtggcggcctgtcgggcgagggcgtcggcccgttgggtgatgaggagttcgttctggcgcaccaggtcgagggcggcggtgtttctggatgccttgatgggcgggatgatgccggcggtccagtcgtcgcgcaccgcaccgttgagccggtcgagcaggccgctgctgagccggccggccatgacggcggcggggtcctgccggtttccgtgctcgtccttggggctgatgtcgcggctgacgatggccatggcccgcttggggtcggtcatccaggcgcgggaccatagcgcgcgcagccactcccagttcggggacctcgtgatcatgctcacgatgcccgggttgtggcattggcggagcttggcctcgaggtgggggccggcgatgaggccggcggcgtagtcgtgttcgctcaggagccgggtcaggctgtatctctcctcgtgttcgtcgatgcgggtctcggaggcggtgcgcgtgtcggggcgcgtcaggagcgtggagagcatgcgttggcgggcgatggcttcggggtcggtgtccgatccggacagcatggcttccgtctgccgggtcttctcgtccttgcacgcgtagaggaggtggttctcctcgcggcctcgtgtggcggccacgtattgcaggttgcatgggacgcgcgcgtcggaggggaacatggcggcgcaccggtcgacggtcatgccctggcttttgtggatggtggtcgcgtacccggcctcgcagttcgctttcgcccagtcccggggtatggtccattgccttccgtccgcgtcgcggcatgcgatcgcgtccgtgtcgatgcgggtgacggtgaacgccatgccgttctcgatgcggtgtccgtcggggccacgtacctggtggtcgttggcgcgggacacgatccggtccccggctcctatcttcaggccgtcggacagcgtggcgaggcgggacgggtccccgtcggacaggccgagcacgcgccgttcgaggatggtgcgctggttcatggcgcgcacctgttcgttggtgccggcgacgaggagcgtggtcttgcccgtcttctgccattgcagggtcatccggtacgcctcctcctcgcattcccggtcctcgccccagtggagacggtggtgggccgcgtattcggcgacgagccggcggcatgcctcgacgctgtccggtttcgcgcggtcgccgccggcgcgcaggcgcagcgtggctttgccttcgtctgcccatctggcccgtccgccgtcggggtcattcgcccagagcccggggtcgctgcggaaacgccacaggctggtgagggtcgcgcaccggtgttcccgttcggcccaggcgagcaggccgcccggggcggcgggcgtgtcgagctgcatggggtcgccggtcagtacgagcctggctccggcccgttcgcacagttcggcgatggcgtccagttccggggtgccgaccatgcccgcctcgtctacgatgacgagctgtccggggtggatgaggccggcctgttcccgggcgtcggattcgctgatggcgcggcgtatccggtcgcgttcggcgggggtgcgcgccgcggcgagccggcaccggaattcgcgtcgcaggtcgtcgatctgcgcccggtgccgttcggatacgttgtcgaggagcttggcgatggtgatcgcgttggcgccgatgctgtcggcgagctcgtccctggcccggacggacagggtcaggccgagcacggatcccctcccgtgccgggtctcccatgctcgggcgacggcgcgcatggtggtcgtctttccggtgccggcggggccgatgagcgcgctggccgcgtgcgggttctcgagcaggtatgcggcggccttcgcctggtcgtcgctcagccggtttccgccggcccgcatggactggatgagccgggtgccctccccgggtccccaggcgagcgggtcggtccggccgaacgtggccatgacgcgtttttccatgtcgaggatcgtctggctggcgtatcggtcgagtgtggggtcgtcgaacgtgctgcgtccggcgcggctgacgagcgcggggtcgtcgccggcctgtcctgcacggtagcgggtcggggttattttcacgcagcggcggatggcgagttcggcgacctggttggcggtgtcggcgcgggccgtggggtcgagccggatgtcggcgaggaggcgttcggcttcggcccggatgttgctgagcgtccatgtggcacgggtgcgttcggtgtgtgccatggcagcgtcggcgagccgttcgagttccgtccggccgggtgtctggtggtcggcgagctgtccggcgaggcggatgcccgcggcccgggaggcggtctgtcccagttccatggtcctgtcccggtgcgagtcgaccgcctgccacatggcgtcgatgctggtgccgggggcttcggcccgcagtttgccgtgccatcgtcgggtcagttcggccagtccgggtcgggcgtcggtcttgggcttgcgggtttccagccagacctgtttgtggagttcggcgcgtcgtttccatccgatcgtatggccggtgcggcgttcctcctcgtcgatgatggcggcgagccgggtttcgatctccctgtcgcgtccgctgaacgcgtcgatgagctcctcgggcactccctggacctcgccggccacggccctggtgccgcgtccgcgggcgcgggccggttcgtgccaggcccagccgagtcgttgggtgagcaggtccttgacgaggttggcgttgtattcgctcagttcgacggtggccccgtagacggcgcgtccgtcgagcgcggtccattggccgtccgtggtgcggcgcacccggttggagatgaccaggtgcgtgtgcgggtgggggtcgccgtccctggagtcccagtggtcgaaggcgaagccggcgaccccgtcgcaggccgtgctggcgacgccgccggccccggcccgggtggccgcgtattcggcttcgaagtagccgatggtcatgtcggccgcctggtggaggcattcgtcgatggcgcggcgcgtgtcctggtcggcgaacgcccagaggatgctcacgcttttgggcacggtctgggtcaggtcgtatccggcgatgggcggctgcccgtcgttgtcggcccgtatgccggcctggtcgaggctgcggccggtttcggggtttcggcgttcgttgatgagcatgcgcacggtctcggcgccggcctgccgtccggtctcgccgccgagcagccggctggccgatccgatccatcggccgggcgggttgccttcggcgttgtagtaggcggccgggtcggggcctgtgagcggtccggtcgtggcctcgtcgggtatggcgccgtcggcctggagcgcctcgcgcgtgcggtcgaggtagtagtcggcgctgctgagtttggtcatgctgatggccatgcgtggtcctctcccttccctgcggcgccgcgggccggtccgtggcggcgcaggagtcgttccgcgtccccgtcctcgccggtccggtcgcatgcgtcgatgatgcggccgatctggccgtcgggtcccgcctgcgtgacggaccgggggtcgtggacggcggcgagcgtgagcatgcgcatgagcaggatgtgggtgcgggcgcgcgtctcgatgccatgtcgccgtatggtttcggtgtccagttcgatggcgtgcgccctcgtcagcaggtcgtcggcgttcattctgagcctttcgatggttccggcgttggcggcggagcgcagcatgcgccgatcgcgcgccgtcttgtagtcatgtgccttgcggcatgcgtcgccgcagtattcgcctcgcgtgccggtatcgagccgtgcgccgcattcgtggcatgatcgccgtgggcgggcacttgtcccggtgcgggcgagccggttccacctgttgcggcaccggtcggagcagaagtcgggcacgggtccctgggcgggcttgtacacgggttcgccgcacatgcggcagtggccggccggcacccgtcccggttccgccttgcgcgcctggcgccggcatcgggccgagcagtacccgtccgcccataccagggtctcggggtgcgggcaccgggcccatctgcatcggccgggtctgggccattcgcttgtggcccctgtggtccctgggcggtcgctcatggcctggccccttcgtcgagggaccaccatccgtggtccgcgccgttgcgtcctcgatggtcctcggcccatatgccctcgatgatccggtccatgtcgacggcccgcgggcccgcgccgtcgtcgtggtccaggtcggcgcgccattcgtcgtccaccccgggcccgggttcgggccacatgccctcgagcgtgtggtcttcgcccgtgtcggtcatggccgggtccatggtccatgggcgtggacccctccagccggtcaggcccgcgatccggtccatgcccttgcgtccgatggaccgggccaggtccacggcccaccggtcctcgtatgccatgagcgtttccggttcgagccgcatgagcgccgccatgcatctgaccgaccagtagcacagttcgaccgtcccgtggtcggctgggccgacggcctcgttgcgccatgccacccgccggcgcagttcggcggccgcctcggcgacgtcgttcctggatgccatcaggagcgactcctgcgacatgcggcgtccgcgttcccgttccttcctcaactcctcccggcgccggttccggcatgcccggtggatcgacagcggcttcccgcggcgcgggtcccgctcctccaccgcgagcccgcacaccgggcatgcgggcggctcctggatcatgttcccatcgttcatggcgcccccacccggcccgcgtctcccgtcccgtcgataacgccgaaccccgatatcggacgcccggacggcaaacaccatcaaaaacgttgccgttccgccgataggcggccgccgtgaggcggtgggtgcaagaagtccatctccttcggagattgcatcgggatgtgctttttcttgggttttctgatggcgtcgtaccttgtgactggctgtgtgggttcttggttctgtcttcgttgtttctggtttctgtgtcgtgctttttcgtctgtctgggtgctggttttcatgtcgggttttatttcgcgtatgtgtctgttgtgccgctgtttgttcggggccggctgccgcacggaggccgggcatggcgcccccggcgggtgccggctcctgccgaacggggagacgtccacggtcgggagcctgcccgtcgactgtcggggatgcggcaccggtcccgggcgcgccgcgcgatgcgcatggctccgctccatgtgcgtttggggagaccggcccgatggcggtgggctctcgggccatggaccgcatgaaccgggtccacccgccgacctgcccatatggtccttggaccgtggcccggtggacagggacgccatcgtccggcccggtccatggaccaggggtggtccgcgtggccgtccccgcatgggctttcgcgtggaccacgtatttgattggtccgccgaatggagaccgtggtccgtcagggtggtccgcgatgccggccctcacatgggctttcgcgtgggccgcatgattggtccggcatgtggaccattggtccattcgcatgatgtggaccggaagcgcgcagggcatgctgatggcccacacgcatcgacgtggcccattcggcctcctggtccaaggtcccggacgccggccatggcccacacggcggggcctgatcgtggaccgggccgtcttggatggcccatggtcctggttgacgccgtcttccgcgtccgatcggcccgtccggccgacggcggatacgcgacgactacgccaagacctttttattcttcgtgtcgcgccccggtgaattcgatgtcccagaccatcattcgaactccgggacatagccgtcatcgacgggcttgtattccttgccgaacacgtcgtccatgccgagtcttgtcccgtcgccctttttcatccgttcctcggcttcgaggtacagggcgaagtcctcttcggcctcggtgagtcggcggtactcgtccgggctgatgacgccggcggccggcttgttgtttcgcatgaccacgatggggttgttgttccccaccctgctgagcgtcttgctgacccctccgtggctgagttcggacacggaaacgaggttgtccaatgtgatgtttcccgccattcgccctgctccgatcggttcaaaaaaatagctattatcgtgatgataatcgtattcacgttttgctggtcggtcaggggaggacagggcccgtccggccccgccatcccatgccggtcacttggtcggcgcccaggggtcgattccggtctggggcttcggtgtctggtatccgtcggcggggaagtgtccggtgttgcgtacgtagttgacgaggtcggagtgtgcgatgtccgcccaggggtcgtttgcggtgttgtcgagggtcttggtgttcatcttcgttttcctttccggttggtgacgaccgctctttgccgcggtgcgcgtcggggcgtcaatgggacgcgcggggccccgcaggggtcgcgtggaccgttgacgtcccggcgtgcgccgtggcatggtgcgccaaggaaccgatcgggagggaaaacgaagatggacgccgggacccgggccacgtcgtcgtcccggcttggttggatggatgccgtctccatcccggttcgtggatggcgttgtcgttgacggcatatggatgcggaagggctggatgatggggacggctgatgtcgatcgcttctcgtaccggtttcgtcggtccttcgaggatggcgggcacgtcgacgcctgtgtcgaactgtccggattgagatggctgtatgtttccacgtccacggctttggctggcatccgtcgcctcgttgccggggttctggcggacatggattcggtgttcggccgtctttgatggacgtcacccgttcctgtctggaatgtgaaggcggggcctccggcttatggatggccccgcccgtttgtttcgctgcggttttccgatcactcgtcgtcgggtatggtgtcatggtcgtagatgccgaccatgcggatggtgcgtttcgcctcgcgtctgaagtagaccacgagcacgtcgtcgtcgaaggtgtggaactcgaagtggtttccgtccccgaacgggctgcgctcgagcgggtggtcgtgccatccgctctcctccacgcgccccttggccgccagttcgcagatcgcctcccttatggatcggatgatggacgcgaactgttcgtgggtgtatttctccttgaggggcagcgcggtccgccagaaatgcggcgaggccttgacgctccagttcactggcctacctcctgtgcggtgaggccgagttccccgagcacgtcgtcggggatggttcgtgcgtcggtggcgtcgtcggcgaccagcccgtattcctgggcctcggcgagcagcatgtcgcggcgtacgtcctcgccgagttcgcgtgcggccggggaggagaagacgccgtcgaacggggtgcggttctcgtgggcgacctgggtgaccatcatcttcatggcggcgggcgtggtgatgccgttgcgcgcgaaggcggcgtcggcacgcgctttgacgtcgtcggggacgttgatctggatcaatgccatggtaagcctccttctccttatgtgttttccatataatatcataatctgcttggtgttgattcgggaatgataccgataccgttcgcccatgtctcggcccatgccgtttatttgaatcgttcctggatgggccgcagcgccccggtggcggcgagcaggagcgcggcctgcgcctgccgtcccgtgcggatgccgtcgagccggtatcggcttgtcgccttccatatctcgttttcgcgtttcacgtcgatcaggagcatgtcccgtcggatcacggtgccgtcgatgctgcggacgctccatgtgcacagccaggcgtggatggcgccggcctcgatggggcagccggcccgctggcatgcgtccagggtcgtcctgctggggatgatctggcgcggctgcgcgccgatgggcgggcggatccgctcgtccatcgcatcgaacgccttcgccgctccttcctcgtcgccggtgtcgatccattcgtccatggcatgtcgccgcatgttggcctcttttccgggtgagggccggcccggcgtatgtgtgggccggccttggtcgtgtgtggtcgtcgtcagatcgtcggctgctggggtgccgcgggcgcgaacccgtcggtgaaggcgggctgcctggtttgggctcccgtggcgttccacgggtcgttggcgggcgtcgtcggctgctggggctgcggctgggccatgggctggttcggctgtggtgtgcggcctgcgaacccgttgtcgcgcggcgccttgttgtaggcgatggtgccggcgcgcaggctgatggcgaggtcggtggcgcgcagttcgaggatgcttcgtttcgctccctgctggttcgtgtattcgcgttgcacgtagctgccggtgacgatgacgggcacgcctttctgcttgccgtcgggtccggtcggcagcatgctgtgctgcaggtgttcggccaggtatccgctggcggtgcaacggatccatgtggtggcgccgtcctcccattggccggtctgcgggttctgggtgcggctggtctgggcgacgtcgaacgtggcccatatgccgccgtcctgtcgggtgtggaattcgatgctgccggtgtttccgctgatggtcagcgtgacctggttgatggtcgccatgatggtgttcctttccttgcgggttatggctgttctgttttcgggaggcggcccgtgccgtcttccgtgtgggtcacctgttgccggcgcgatagcgtcggtctgcctggctcattggttggtggacaggttgatggtgatgacggggttggtgatgtcgggcatggagtcggctggcggccagtcgtcgatgccggcggcctgcatgatggcggcgaggcagccgctgtgggcggcggcgatctcccattgccagcattgcctgttggacagggcgatgaggtggtcccacatggggtagccgttttcgtcgagcgcgggccggccggcgttgagcaggccgatgagttttctggcctgggcgcgcaggcgttcggcttcgcgtgcggtgacggtgtcgacttgttgccagatgcggcgggtggtctcgtcgtcgatgccgttcgcggcctgttcccatgcctggttcctgaggtcggcggcctcctgggtttcggcggggtcgagggtgaggcttttcctccaggtgatgcccatctgccatgcgccggagtcggtggcctgtgtctggctggtgatggtggccgttatcctgtactggctcatgatggtgtcctttcctgtgtcgtggatcgtctgtccggctatcccctgattttttctttttggcctttcggtcaagcgcagcgttaccggccaaagcgggttccgtccaatcgatcgcgccgggcgcagcccgtctgcgtggcgatttgacgggttccgcgacgccggtatgatcgtttcggcttcagccgaaaaggccgaaaagggaaacctggggccgcgcccctttggggcgttcctttttctgatagggcttgcccgtccatcgtgtttcccgcatgcgtgcgggagaccgatgccggtcgggggccggcggttcgggccggcgtggggaggtccgggaggggtgcgtggcccttcccggccgccggaggccgtccccggccgcctggttggcgcgggcggggactccttggccgtgggtcagccgatggggtggacgggtatcatgaacgttttgccgtcggggagcctgcagggcgcttcggggtcggcgaacatggcggcgtagcgtccgatctgctcgtcgtcgagtccgagggggccgtcctgcgggtggggtcccgtgatgacgaacgtgccgcggatgatgatgggcttgccggcgtccgcgaggcggctgtcctggctgaggcggatggtgcggttcggcttgaggttcttgatcgctccctcttcgtcgcaccagagcgtggtccgccggtcgaggggcaatggttcggcgtatccgccgatcgtctctccgatggccgtgatgctggggtcgatgtcgcgcagttccggacggcgcaaaggttcgatgacgagcgtcttgatggtgtccatgatggtggtcctttccttgcaggggtttgcctgtcctcccgcgtgggcgggaggacgctgctgttattcgtcgatgtggccggcggggatggtcctgcgttgtgccgccctgcggcggcgttgcggggtgtcgatgctcggcggggtgcgtcgcctggtcttgcggccgtatatcttccagtcgatgccggcggccgtggccatgatcgctatgacgacgacgttgccgatggcttcggcgaattccgggcttgcgaggtattggctgatgaggtccattgggactccttgtggtttgtcctgggctttgctttcggccttccttggccggcatgtcacgccgtttgcccgccgatgtaggcgtcggcctcggccatggatgcgcagtagcgtccgtagccggcgtcgacccaatggccttgggccttgtggagctggtgcacgtcgtacgggcgtgcgccgtcgcccgtctcctcgacgtcgtaccggtatccgccgcgttcgatgcttttgatgatgttgcgtgccatggtgtctgctcccgtctggtggtcccttgttttttcttttcgaccggttggtcaagcgcagcgttaccggccaaagcgggttccgtcattgagcgatcacgccgggcgcagcccgttgcgtggcgcgttgacgggttccgcgacgccggtatgatccagaggcgaagccgaccggccgaaaagaaaaaggaatgggccggcccgccccttggggcgggttccgtgcgggggaatcgtgccgtgtccgcggcgtggacgcggacgggatgcgatgatggcccctttggggggccttgcatcccgggagcggacatgccggtggcgcggctccttcgtctgatagggcttcgcccgtttcgccgtcgccccgtctggcggggcgcggcgtctgggtggggtccggcggcgtgggccggccggggtttgcaaaggggcggcgtgagcccctttgcccgccgggggccgtccccgtccgcctgcctgatgcgggcggggactctttcggatgacgggcctgccgtcggcgttttccttctccgtcatgtgagggggtggcggctggcgtcccggttcatgaggtcgcgcaggtcgtcgagcgtgtcgaggcattggcggcgggtgttctccggtgtttcgatgccgtggttggcggcgtggtggtgccagaggacggtttgggcgaggctggaggccttgtgcgccacgtcgtcgagcatttcgtcgagcgcttcggccgtccattgctcccagtgggggtcgtcgtccggcggggcggacagcgcggcgtcgagccggtcgagcatggtttgtatggctttggcgtcttcgaggagttccgcgatggtgccgggttgtcctttcatcgggctcctgacgagggctcgcacgtgttcgtcggggtcgaattgttcggcgtgttcgtgcaccgtttcggggatgggccggcccgaaggcacgtctatgatgaggtcttccccggcggggctgctggtttcgagccattgcccgccggcgaatccggtgtggagcgtccagccctgttgattggcggtggtttcgatggtgttcgcgtgcatggtgtcgtgtcctttccgtcgtggcgtccgatggcgtgtgccgtcggacgccacggctgttttctgtcggtcagcgcaggtatgcggggtatcggccggatgcggccatggtggcgaccatgatggcgagggtggtttccgggtcgtcgtccagtgcggcgagggcggcgagggtggcggccttcccgtcgccgtcccaccatgcgaggtaggcggcgagggcgtagggttgggcgacgggcccgccgtgctttctggcgcggtcggccatcgcgcacgcctcccgcaccgcgcgggcgaggcgggtctcgtcggggtggatgtgggggtcgtcgaacgcggctttgagcgtttcggtcagcagcgtcttgttgttggacgcgtggggccgggcggccatgtcgatgatggtcgccgtgtcgagtttgggttcgacggcggcgatgagtgcggcgtccctgatggacaggcgggccgtcatgagcgtggcgaggtcgtcgagccgttccgggtccgcatccttgccgtcgagggctcgcatccatgtctcgagcgtgggtccggcgatggtgcggacggcttcgcccgtcccctgttcggttgcggcccgcttgagttcctcgatgatgttccgggttgtggtggtcatggtgttttctcctttttgcgtcttttgttttttgaccttcttcggtcagcggatgcgtaccccgcgtaaggcggttctgtcatgaggcgacgccccgccgtcctgcggcgtgtgcggcggcgttgacgggttcgccgacgcgggtatgcttcgatgggccgaagaaggccaaaccacgtgtttttgccgtgcccgcccttggcgggctccatgcggcggcatggccggcgaccgcgcggtcccgccggttccgtttcccttcgccgtcgccccgcgtcgcggggtgcggcgcctgggtgggctccggcggccgggggccggcccggtttccaaagggcggtttgagccctttggcctgccgggggccgtcgccgcccgcccggcgcgggcggcgactctcgtcagcggcgcggtggcgtgtagtcgagcgtcgtcgcgtatccgctgtcggccatctcctcgatggcggtttcgtatccggcttcgagtccctgccggtacgcctcctcccacaggtcgtatccgatgaggccgttcgtgtcccagttggtgttgctgacttcgatggccccggtgccgcccgggatggtctcgtggtcggcggtgagccattcgagcctgccgttttggtcgatgagcgcgaacctgccttggcttccgtccgcgaggtcggcttgcccggcctgccatgcgagtatcgcgttgcggctgtcggacgcgtgtcggccgcgcgtgtacgagtgggcgatgccgttgtgggcgatgaagccggtgcggtcgcctttgcggaagcggaacgggtgcgtgttcccggtgcacaccctgccgtgggtggcgagccggaagtgcaggaggaacggggaggtttcgaggctctgccagtggtccatgatgaacgcgagcgtcttcatgttgtcttcgttgcggtagcggtggaggcgttggccgtcgtgccatgcgatgcccgccccgtcggggttggcgtcgctcatccgggcgagctgggtgaggcttggcatggtgtccgcttggctggtgacgatgacgcacatcagattcgtccccttcccgccgtcgtggcgttcgtgtcgttgatggcctgtgtggcggcgacgcggctcatggcttggatgtcgcgggtcttgagcttggggacggggaacttctggaagaaccgccacatggcgtgcatgtaatggacggcggcgtcgagtcttccggcggtgtcgtggtgccacgggccgaacgttcggaattcgatggtgtggcggtgcgtgtcgttgatggcggtgtccttgccgcagtagtcgccgtggatgagctcgcaccagcgtgtgtcggtcatgtggcgcatgttcagcgcctcgcattgggtctcgtcgagcgcttccagcgcccagtaccagcgggccggggtctgccggccggtgcggctgatgtgcatgtgcccgcccgacaatgtgttgtcggtgtcggtggcgatgcgttcgacgagtcggcggatttccgtgagctggctcatggtcatgggttcgctctggtattcgagggagccgtcgtggtggaggctgccgtccgggcaccagccggcgatgagcctgtggttcctgagcatgtcggtgtcgtggttgccgtccacttcgatttccagtccgaaggtgaacggctcgcggacgggccgtccctcgtacgggtcccggtagcaggggtcctgcgtgttcgcgcaggcgtgccgttcgtagcagtaggggcagtagcgttcgtcgcactgctcgcagtattcctggcagtccgagcacaggcggtcgtcgcacatgcggcaccggtacccgcagtcctcgcacaggctgtgctcgcagtgctcgcagcagtatgcgcagtccccgcacatccgcgaaccgcattcgttgcatgtgcgcgcgcagtcgtcgcatacagtgttgccgcacccgcattcgacggtttccgtccccgcgcagtcctcgcatagccatccgtcgcagtcgtggcaccgtacggcgcactcccccgactggcgttcgcagtgcctgcaccgacggtcgtccctttggatgtcatggttgtttccggtcatttgtcacgctcctatgtcgtcttgtcttccggacggtgcgcggcgggaccggatggccgcggcgcggcgcaagccgcgtggccggtcggcccggtgccgggaccgccttcggcggcggcaccggtcggcagacacgcggacgcttgcgacgcgccggacgtccggtcatgctgtgtgccggccggccgggccggggcccgccttcgatggcgggaccccttttcgacgtgctcccgccggatggcggggcgcggcggcggatccgcgagcccttcggggcgagctccgttttcggcggcgatccggatccgactggacagggattcccaaaacaggtatcattgtttcctgtagtaggaaatcgaggtctggagggatcatggacggttcgttgtctcggatgcgcgggaaggcggacttccgcctgatgcgggagctgctgggcctgccgcaggagtgggtcgccaagcgcgtgggcgtggacgctcgcaccgtccgcaactgggagagcccgaggtatttctacccgccgaagcgcgaggcatgggacctggtggagggcctgtggcggcgggccgacgcgaaggcggccggcctggtggagatcgcctcgtcggcggcccgggtggcgcgggagcgcggcgtcgagccggcgccgctcatgctggcgtactggcgggacgcggcccagtgggcgaaggcgcatccggaggacggggatgcgggcatgtggcggatcgagaacgcggcggcgcgcctggccgcggaccggctgcacgccatgggcctgccggtcgcgatcgcgtacgcggagcccgaggcgtgacggatgccccctatctcatgtcacgatagggggtatttgacttccatggttcgattgtatagtttggaatcaaggccttggcccatgctcctcttcccgtccggaggtcggggttgaagccgaagtcttatcggaggattggctgtccgcggattccccatgaaccggccgtgcggaacatgcgttgcgagaattgggagtctagcccctgcgaacgggtgatacggatcgacgcgacggcatcgattcgagttcgtgtccgacccttttgggtagtcatgcagaagaccgaaacaacagtcctccacaacccgggaacgttaccggtcttgacgttcccgggtttttatcgtctttcggagaggggcttcatgaccgccgcgtcgcatagggggtcggaactcgaccgctcccggaaaaagaaactcattcccatgtatcgcgcggcggccaagaagtacaggccgctgatcggccggcattcccttatcacctgcgaggatggcctcgtcatcgacatcctatgggagaagcgcaacttcgagcatctgtgcggcgtatggtgcgacaggccgccgcaggtggtccatgccggaaagaccatagaggccaattatttcttcgaccagctgatcaagggacgccttccctcctcggccatacattactccgattatccacggacaagaggcaaggccgaggtgctttcgaacgcgttggaccttgaaggcaacgtggatgtggtggtcgactccgacaaggccgaagtggtgtattacctcggcggcgaggcgtggtgcctgggattggattccgattggaacgggaaccggatgcggtcgggcctttgcaacggcaacgtgttctaccccaagagcattcgccgtcagtccgtatataaacgaatgaggacggacagcatcccccatcgcgtttcagcggtggaactggtcagcccctgagtccttgccgacgtacgcccgaagccttggcagcgatcgcatacgcggagcccgaggcgtaggacacgaacggcccatccgacatccgccgtcgcggccgtccgcgtccgacaacagatcctcattgactcttacgtacaaacgccgtacggttatggcatgacggaaatcaccagcaaggccagccgcttcgagatgcggctcacgccatcacagaaggaacgcctcgaccgggcggccgagttcaggggactcagcacctctcaatgggcgttgaccaacctgctcgtcgccgccgaccgggacatccgggagtctcatgtcctccatttggatgacgaggcgtgggattcgttcgtacgggccctggacgagcccatgccggaggagatggtccggctgctcgagagcgagccgatctggaaatgaccgatttcaccccgccgcggcgtctgaccgccgaggacgacgccgacggtttcgactgcggcctgccggttgtcaatgactggctgcggaaccagttgagaaatgccggcaagcagcatacggcggtcgcctatgccacgttctgcgacggcgcgccggccggtttctacacgttgggcgcgtacagcatcggccatgccgaggccaatggctggctcaggaggaacagcccggatccgatcccggcgatccttctgggcatgctcggcgtggccatgcgctaccagaccatgcacgtgggggcacagctgctcagggacgccgccatgcgggcgatgggtgcggcggagatagtcggagccaaggcgttgctcgtggagccggcctcggacagggccacgcgcttctacgagcattacgggttccgccacatcgaacggtcgggcaggatgttcatcccgctccgttcggcgtgaacgggatgcccgtagaagagggaggcggggagggccgtggacggttctccccgcctccttgttttctctcgaatcgttttcgtcggcccgccgttcatttccttggcgggcgcgctctgccgtccgagtcgaattgggcgagctgtccgatggcgttgccggtgttggccagggccccggtgagcagtcggatccgttcgccggtgtcggcggtccggagggcgagtctgagctggtcgatggccgcgttcacgtggttgcggtagacgaggtcgtcggccgcgtccgaatgttccgttttcgcgggccggggttcgtccatgcgtggtttcccttccggtgtttggtccatgaggtcgagcgcccggacgccgaggccggcggcgaggtcgaggatgatgcggctgcgtttgctgccggtggcccatcggcgggtctcgatgcctccgatggtctgcgtggtctgtccggcccggatggcgagttcggcctggctgagaccttgtcgcgtccggtgccaggcgaggcgggtgccgtcccatccggcgggcggattgtccgtggcatggtccggttcgtgccggccggctagcttttccatgctggtgtcgagcgcgatggcgacgcgggcgaggatcccggccgccatgttcgcggtgtcgcgttccccggaatcgtattggcgcaggctccggtatggcacgttcgcgtgtgcggcgagctgcgggcagctccatccccgttccgtgcgcatcctccggatcacggtggtcgcgccctccccctcttggggcgtctcgcccgtgagccgggcggggttgacgccgagggtcttcgcccattgccggatctggtcgggttcgagcgtggacagcggggtttcgccgttctcgatccgttcgacggtcgctgtgtcaacgccggtgagccgtgcgagggtctgttcgaggacgctttcccgttccctgatcgcgcgcagttccgccgcgccgatggggatggtcctgccgctgccgctcatctgtcgcctcctaggtagatgtcgaacaggggcccgggttcgacgaggccggtgccggtgtcgatggcctggatggcctcgagggtgccgatcatgttccgtacggcgggtctgcttcgggcggagaacgcgccgtgcccgtcgatgagttcgagtccctgttcggtgacgctgcggcgggtggatccgtgcagggcggcggcgagcacgctcggtctgacgccgtggccgagctcgcgttggatgttcgcgatgtaccggcatgcgatgcggatcgattcgcggcccatgggctcgccctgtccctcccccgtttccggtgccgtccgccgccggcggtacgggttcgacgccggttttttcacgatctccctaccgtcagcctggcagttggagcagttggagcagtcgtcgcgtctggtgccgggcgggtcgaacatggcgaggatggtccggcgcaggcatcggcgggtctcgcagtatgcgctcatggcgtcgagtcgggagtccatgagctgcgcggccctgatgcgtgaggggtcgccggattcctcggcgcggcttttcgcctcccatgcggcgtggcgcagccatcgccagtcgccggggctccagtagaggaccgcgtcggcaggcttgccgtcccggccggctcggccggcctcctgccagtaggcttcgaggcttttgcacggcccgtcgttgaggacccatctgacgtcgggcttgtcgacgcccatgccgaacgcgctggtggcgcagatgacgcgcggatggccggcgaggaacccgtcctgcacccgtttcttgtccgcgtccctcatttcggcgtggaacgccatggcgtcgatgccttcggagcgcagtgtctcggcgagccgttcgcagcctttccggttctccttgtagatgatgccgctgcccttgtgccgtttcgcccaggcgatcatggcctcgaggcgttcgccgggcctggcgcggaccaccgtgaggcgcaggttcggccggtccgcgtcggtcgtgaccgtcacggggtcggccaggtgcaggagttcgcggatctccccggcctgcgtccggcttgcggtggcggtcagcgccatggtcacggggcgcggggacagggagtcgatgaattcgccgatgcgcatgtagctgggtcggaagtccgatccccagtgcagcacgcagtgcgcctcgtcgacggcgagcaggctgatgcggatgcggtggctgaagtcggcgaagtcgggcgcgtgcaggcgttcgggtgcgacgtagaggatgcgcagttcgccggacagggcgcgcccgtacacctcggcgcgttccttctcgtccaggccggagtcgatgagcgcggcgggtatgccgcgtgatcgcaggtgccgcacctggtcgcgcatgagcgccctcaatggtgtgacgacgagggtgaacgtgccgggcctggcggcggggagctggtagcacacggacttgccgccgccggtgggcatcacggccatgacgccgcggcccgagatgaccgccccgacggcctcctcctggcccgggcggaacgagtcgaacccgaaatagcgcttcagcgcggccagcatgtaatccccgttcccgaccattccgcttcccttcttttcacccataagtttgataccctcaagtatagcatattcatcgccttatgctggggtgtcattcccggctatcgccgtccccgcgcgcattcccgggtgtatggtgcggaagcggggtggcatggtgatcggtccggacggttgtggtttcgacatgcgttcgccttcggagatggaggcggatgacgcgcggcgtgaggcggatgaggcggcgcatgcgcctcgtatggcggtcacgtcgcgtatccgtcgggtggcgcagccgccggatgggtatctgccgttgtccctgttcgacgaggttcgtctggccgatccggtgccgttgtatgcgttcgaggacgtcccggcggacgtgacgggcctcgcggtggattacctgtcccgtgtggcgcggggcgtgccggcgcgggatgcgttccgggtgccgttggcgggggcgcgtctggtgggccggtctgcggatgcggagcggctgctcgccatggtggacgggttctccgaccgttcggtgcgggccgcgtgcctgctgtgcgggttcgacgcggcgtcgcgtcggggcccggcgaggtggcgggcgggcagggtcatcgatccggggccggccacggtgtataacgtgcggcgcatggtggcgcgcacgttgaggttcatggaccgggtggggccggtcgtgtgggaggggttcacgttcgacggcggctacacggaccgggtcacgtccggagacggggacctgctcaccgccgacggcctgtgggatctgaaggtgagccgttggccgccgaacccgacgtacacgctgcagctgctcgtctattggcggctcggcctgcattccacgcatcccgagtatctcagggtgcggcgtctgggcctgtacaacgcgcggtcggacacgatgtggagcgttcccgtggcccggatcggcgccgatgccgtgcgtgcggtggagcgggatgtgatcggctatgcggacggtctctgactctcgcgccggccggttctattcgcgggggttcgtggccgggagttccggcatggggcgggcgagtctggcggccgcgtcggcgagcagccggcgggcctggtccacggtgtgggcggcctcgtgttcgcgtcggtcggcgtccgcgatccttgccttggcctccgcgtcgattcccgcggccttctcctcggctgttctgaggatccggtcggcttcggtgttggcgtcggacaggagtttctgcgcctgttcgcggctttcgccgattctcctgtcggcttcctggtcgatcccctgtttgcgccgcgtggcctgttcgatctgttcgtccgcttttttcttcgcttcggcggtcagggtctcggctttggcccgcgccttgccgaggatggtcctggcttccgtttcggccttgtcgaggatggccttgcgttcggccttggcgccgttgaccatgttctgcatgtcgacgccgatgtgctcgtaggggttcgacgcctggtattcgagcttcttgttttgctcccggagcatggtcagacgctggttgagctccccgttctcggtctgccgcgcgtggttctcgcgtttgagccggatgatctcggcctggtcgagcgtgcggcgtcgttcgagttcggcgacgcgtcgttccacggcgtcggcccggtatccgccgatcgtggcgcggggcaggtcgagcggtttcgtctcggcgcgcccgtagtcgcggatgggttggatgaactgggtctcctcgccgtcggatcgtctcgcctccgtgccttcggtgtctgtcatgatggttcctttcctgtcggccggtgcgtttcgcatgggtcacccgcgccggccgcgataatcggatccacgtcataggtatacgtgaatatgcgtttttttgatgattcacgtatacttatgttcatgcgtagggagttggcgatgaaccgcctgagggatatggacacgggtttcggcgtgcacgtgtatcgcaagccggatctggcgctggttctcggggaaacgggacaaaggctcgaccgcaccttgtcgagcctggtagcggcgaacgtgctggtccgcgccgcgcgcggcgtgtacgcgttcgcctggtcggcgcatctcggggaggcgacgctgcataccgtcgcacgccggctgcgcccccgacagctggtgtgggagagcctggagagcgcgctgagccgttggggcgtgatcagccagatcccggtggatcgcgtcacgttcatgaccaccggccgtgagggcttggccgtgaccccatatgggacgatcgagttcacgcactgcgcgctcgactggtcgaggatactccccaacctcgtgccgcgtgacggtgggatgacgccgctcgcgtcgaaacgttgggcgtatcgggacctgaaggccacaggccgtaacctggatctcgtggacatggatgaattggagaacgacgatggatgggagtgacatggcgttcgactacaaggcggtcgcggcgggcatcgcgcgttcggaaggcatgggtgccctgcttcccgtggtggagaaggaactgctgcattaccggatactttccgccatgcaggacggcggcttcttcggcccgatcgtgttccaaggaggcacgagcctgcgtctgtgccacgggtccccccgttacagcgaggacctcgacttcgccggcggcacgggtttcggcgtcgatgaccttcgggggttgggcgaatgcgtcaggtcctccctcgccggcatgtccccggacgtgcaggtgaaggttcgcgaaccggtccgggacgagggcctggtgaggagatggcgcatatccatccgcacggcggcgcaacgtcgtgatctgccgagccagtcgatcaagctggaggtcgcatcggtgccggcgcatgagccgcagacgaggccggtcagggtcaattatccctccgtgtcggcgatcgccggggacatcatcctggcggtggaaagccccaccgagatactcgcggacaagcttctgtcgtttgcatgctcctcccatatccgccgtcgtgacctgtgggacatgtgctggctgtcgtccagggccgacgtggatgcgtctcgggcgttccggatggccacgctcaaggctggggaatacggggaggtcggagaatgggaggcgcgcgcaggccggctgcgtgagatcccgtcggtgttgtcttcggacgcctttctggacgagatgcgaaggttcctgccggcccgaatgctcgtcgccaccgtcgaatccctctcctggcgcgagtacgcctcgcaggcggtcaccgggctgtatgatccctccgggcccgcatgggcgtcgccgtatggctcgccgggtttcgggcggccgatgcctgagcccgaccagtcttccgccgttcccatgtggcgtgacgggggtcccgctctttcctgaggcggcgtcctcgccccattctcatctcatccgcagcgcgcgcagcatggggttatggtatggttcggtgacttccatgaggcgggtcggccgcccgtagggtccgtaggcggtgatggcgggttcgaccgggcggatgatgccggcgcgttcgagttcgagcagcgggtatgcggccgacgggtcggggttcgggtagaacctgccgtccggtgggatggccccgtcgggttcccaggagacgtccagcttcccgccgggtccggtgacggtcagtcccatgccgccgccgtggtggcggccggcgagcaggtgccaggtctcgagcgcgtccgtatccccgccgcgtcgggggtcggcgtgccagggtctgccgcgtgtggcgagcaggtggcggcgttccccgtcgaacctcgccgcatccagtcgcctccatgtccaccggtcgacctcgaagcggatgccgtgtcccctgatgaggggcggcacggccccggtgacggggttcacttgcggcctccgcggatgatgtgtctgacgcacatggcgagcaggacgaggtcgagggcggcggtgacgatccacagccatcccatccgcggcatgatcgcgcattcgatgatcaggaggatgaggatggcgaggcatgcgagggcgaggaggatggccttgcggcgttcgtcgtccatcattcccctccgtccgtctcgtcggcccagtattggtcctcgaaccagtggtcgaagcgcatgtcgcccgatccggtggcggggtccgaggcgagtgtggcctcgtcggccgccgggtcgtacaggcggtctatgtcgaggtcgccgagccagtcctcgagccatgcctcgagtccgctgccctcctcgttgtcgtcgtcggcgatgagccggatggccctgctgatgaggatctcctcgatgacgctgtgggccgcatggttcgcggtcgggtcggcgaggcgggcgcgcaggcgtattgcggcgccgagcatgcggtagaggaattcgcggtcgtaccggtcgaggtaccggtcgggcaggaggtccgtgacggggttcccgtcgtcctggccgaggtgcgtgccgcggggcatgcggcccagacgtctgatctcgatcctcgtcatggtctcgatcatggacaggttctcgtcgaacagcctgcgcatgcgggtgcccggcatggggcggtcgccgccggtgtcgttgttcataggttccttccgtacttcgtgtatctcgtgtattccccgtggcgggtgccgatgagcgtgatctgcgcgtccacgatccttttgcgccgttcgagctcgcgtatcccccggttcagccaggcggacagttcgacgcagccgacggtggccgtgtcgcaccggcgcaggtcgcgggcgactccctcgagcaggagtccctggaccgcaagctggatcacgccgctgttcttgaactgcttggcggcctgttcgagccggtcgccgggattggccgggcccgcgctcatcgggcggtcccgtccgccatgctcagttcgagccgtcgcagccgttcctcgagtgcgttgatgcgcatggtctgggcgagcaccacgctcatcggcgcgggtcttccctccctgccggcgtcgctcgccggggcgtgcgggcgcgtcgtcccggcgtccggcggttcgcgtttccaccgggcgatgcaccgttcgatgcgtttgttgccgatgatgcgcgggtcgagtcccgcctcgcggaagatcctgacggggctttcgccccgccggtagcgttcgatggcctcgcgtttgaacgagtccttgtaggtgatgcgcgtgcgggtgacccatgccacggcgtccagtccggacagcaatgccatctcggcgtccgagaaacccgtcatgcccatggcgtccccgcctccggtgcggtcccgcccgggattccggacactcgtccggccggtctttccgtcctgtggtcctgcatgtgcggctccttgcctctccggggccctgccttgtggccccttcgcccatgccacccgtggccccttctatatcgggggattcctccgccgcgcaagaccgatctttcttcgtgtccgcagccccaaaacaaaatgttgacaatgacaataaacaacgttattgttgtcaccgtcagcaaaaatattgctgacggctgatagtcgaaggattatcgcagataaaggataaaagaacagagccgctccttgagaagctcaaggaacagggatggcgcatcgaagccaagaagaaaggctggatgtgctacccacccgacaagtcgaagccgggcgttcccatacacaagacaccttcggatgccagatggtatgagaattgcttgaaatacctgagacgcggcgggttccaagagtgagcggtcgctaatcttgcggagacgaagtttcctaggcttgtcaccgcaagattagcacaccctctgttcccccatcaaccttcgaccgctagggcggctggatggcgtgcgcccatggaggcatctcccggcgcacgccatgcaatacatcggataggtgaaacatgacgagagcacgagaatggcaggtttcccttgacttcaaggcgagactcgacgaggacgcggcgttcgacctcatggaagccctcggaagatacggggcctcggtggcggtcgaccccgggcacacgggcggcggactgaccctcgccgtcgacgccccggacggggagacggcgctggccaaggcgcgcacgctcctcgaagagaacatgcccggcgcatcggtgaccggactcgaagcgagggaatgggccgacgccgtggcgcgaaaccgcgaacccctatacccgccggtggtgggctacgccgagatcgcgcgcatgaccggcgtcaccagacagagggcgtacgcgtttcccaggatcgaatcctttcccaagccggtgatagagacctcacagggccccctctattccgaggatgcggttcgcgcatgggcgcagacccgcgagctcagacccggacgtccgaaagcgatggaataggaaacgatgcgagagccccgcggccgcacggcgcggggtttattttttatttttttacaaggaggaagcggctgttccccgatggattcgtcgggaagggaatcggccgtcaccaggtccggtccggttggatcacgggacgtgtggcccggtccctgagccggaatgattgggtcattcgcgcatgggctccctcgagcatcacggtccaggtcgtcggggatacggtcctgagcccgatgccgttctggaacgccaggatgaggtcgttgcggaccggtgtctggcccttgttccggttctccacggtgtagcgcacttcgagcaggtccttgcaggtggcgtattccacgtccgtcatgagcagcccgtcatgctccccgtattccaatggataggatatgaattccgtgccccgtggtacgtgccattccctccattccgcgtgttcttccaagagcaaccccacatatccgacggccaaagcggtcagtacaatcaacacggcgatgacaacaaagctcattttcccctcccgcagaagaaggcatgacgaatatggacaaatctaaaagcggacgagcattgaattccgcggaaaaggccgaggcggatgccccgaccaacaagcaatggctcgataccatcggcggcccgacgggaagccgccgatgattgtccgattccgatgaccgtcggcattgttttattgccgatatcgggctgatggcggataatcgggatcatgaaggatggaatcaatcaatgcgggggttccggcatcgagtccgttgatcatttcgacggtgtcggaatcgtcaggatcagaccagtggtcaataaggtggagataaagagggccaagcgtctgattgtcgaacagatccctcatcttgccgatatagaattcccaaagcggccggtcgaggatgacggcacgttgaggcctctttttataggggcgttctccaaggacggcctcataggcgccgccttcgtcacgccaggaatacaggcagcccagtcgttcctcgggtatttctccgcgtcggccggagcgtatcagtgcgcggagcttgtcaggcgtacggtcgccgaagtcgaggggatcgcagtcgtcgacgagtacaggcgcaggggcgtcgcactcgccctgaaaaggtacatcgatgcctgggccgccgatcacggcgcttgtctcgtattgtccgtgcccacgaatgaggcagcgcgtggcctcaacgagaagtccggccaccgcgtcctggagcccgatgtccttctcatgcttcaggtcgtatatgccgacggcggtccctgctcccttccctttgctttggaacgtgggcaggaggcaggatacagttgctgggcattccttccaatcgccaaacctggcgggatgtccgtcagggcgggacaatgtccttccgtcgcttcctctcctggagtatccggtgaggaatacttcgccgtcaagtgggagacccgcgacggtgacgggaattggatcgccacgaccagccgtttgaggggcgtacgcgccgacgtcatggactgatgccattccatcaggccccatgcctggcgcttcggcgttcttgtcttcctgatgattcattcctcgtccttcccctggcgagcggccatgcatggactcatggattgggcacgagtccgcgtgttcgggtgtcttggttgagccgtcattctgcctgctccagttgccagttgccggcgaagcagctgccgccgtgcgaggcacggtagtcgtggagttccctcgatcgttcgctctcccggcgggcttgttcggcccgggttttgcggccggcgcggagcgcgagctcggcgtagcgtgaggcctggcctgggtccgggtcggggtcgaggcgcagcctgtcggtgagggcgcggatagctgtcggcccgtcgacgtcgtcgccgatgcggtcggcgagcatgcggcgcgcccgggtctcgtaggattccggttccgccggccggctctcccccgtgtcgcttccggtgggttggctggcgtcggcatgctccctgcgtcggcgttcgagggttcgctggtcgcaggtcaggtcgtcgcgcagttcgtcgaacaggcgggcgaagcggcgtcccatgtcgacgcgtttggcctggaacccgttgtcgagcgcgtggtcgaggacccgttccatgagcccgctcgtgtcgggttcgccggcggcgtcgagccgttcgacgagccgagtgacggcgtcggtgtcccgccggcctgccggtttcggggtcaggcccatggcggctcggcggttttcgagccggtcgaggatccatctggcgcgtatcccggcggggacccgctcttccggttcggggccggcgtcttgccagcgttcgtcgtcgggctcacccatagggcggttcgcctcgtccggcgcggatgcggcttcgatgatgtgggcggtttggtttttcccgtcgcggctctccccggtccggggagatgcctccgtaggaggcaaaggggatatttgtttagaagtatttgttcttactataggggtgtcactggtgacacccctggaggtgtcaccagtgacacccctggcttccctttccgggtttagaggtgtcattttgacacccctagattttggcttgtttccgccgttttccagaggtgtcattttgacacctctaaatctgtccgcttttccggcctgttcggcattgccgtcgccgtcacgttcggcccgttcggcgcgttccgccctggcctgtcgtccgggtttctcggacacgtgctcgagggtcacgttcatgcagcattcccagacgacggaccggtacgggtcgggcacgtagttgccgtgctcgtcccattgggcgagcttctggttgccccggcggatgcatcccgtctcctcgagcgccttcaaggcacgtttgacgctggattcgctcgtgtgcgcctcggccatcagggtctccacggtgggccatgcgctgcgcccgtcgggctggcagcggtcggccagggcgatgagcacgagtctggccgtggccgtgggtgcgggcgcctccctgagcgcccatgacgtgcattgccagctcatggtcttgcccctttcgtttcgcgttccttcttgtgttcctgcatgagcctgtcgaacgccttgctggtgggttccaggcttccgtaccgggctcccgccgatgcggcggcgcggcccatggcttcctcgttcctgtcctcgtgtccgtcatcgcgcatcgccggacagctccttccccatgtcggcgtcgagggcggtttcgagggcgcggcacaggtcgagcgcctggtcgaacccgtcgagccatgcgcctacccagtcctgggcgtccccgcccccggccggcgtcatgtcgatggtcttgaggcgttccacggccatggcctgccggtcgatccggccgtttccgtcgatgatgatccgcatcgtcttccgttcctttcccgtcgcctcatcgggcgagctcttgcaccgtcatgcccaatgtcatccgggtcgggtcgtggcgtttccgcaccctgtcgcacagggcgggcgagggcatgcgcgcgaacatgccggggtcgagctcccggatctccatctcatatgagacgagcgcgtcgatgacgtcctgcacgcgtgcgcgcagcagatcatgccatctgccgggccatgtctcgcgcatcgccgccgagcacaccatggcctcgtcgcccgcggccttgatgtaccgggtgtgcgcgggcagggcgaggatctcctggatccattgccagtcgtcgccgcgggcggcgtcgatctcgccggagagcatcctccatgcgtcgaacgtcgcgtcgagcatgatcgacgcctgttcccatgtcatggggatcgcggggatctgcagggtgacggcgtcgggttcggcccctgccggggccggcatcatcgtggtcatggtcgttcctttcgttcctctatggttcgcgggcctcgtcgtccggcttcccgttgtcctttcgtttgttctttcactcgcccatcgccggttttcggccgattacgggcgcctgtgccggcgcatgccctgaggtaggggtagcggtccagtctcggggtggtcccgttgtggtgggcttcgagccagtggcggatctccctgagcagggggcgggcgcggttcgaggtcatgcatcgggtcaggatccgtttccatgcggcgagtccccattcggcctggaccgcgagggcgagggcctccatgtccgtcttgtatccggcgctgaccggcaatggggcgtccgccgtgtcgccgtcccattgccggtagctttcccggtcgcccgcggcgggcgatccggggctctcgccgtcgccgtcgcgtccctcgaagatgtcggatgcgtcgcagatcacgtcggagtcggcgagggtctgctcgtgccggcgccaccgttcccacgccgtccggtcgtccgggtccgtgggtggtttcagccttcccgcgcgccgttccggggtctgggtcatgcccgtgcggtgtttgggccgttgggttttgaaccattcgccgaccacggtgccggtgagctggttgacgaacgcggccaggctcgtcgcccctccctcggcccggtccgtgttggtgcggtgccagtagtcgagtcggcggatggtgcgtatcgtcaggtcgctcatgacctcgtccgtggcccatgcccagtcgcggcccagctgccggcgcacgcgcgcccggttgtcctccagcgcggcgtcgagccggagtgcggcctggtcggcgaggcgggcgcgcatgagcctggccccggcttggtccccgtcgtcctcgagccgttcgagggctttcaggtccgtggggtcggcgaggcagcggaccaatgtgtccgtcaacggttcatcgctttccctcatggtcagaaccttccgggatgctcgcggcgcagcgtgtgcaggcgtcgtttggccgtggtggtggatggggcgagaccgtcggcaacggccctggtcgaggtgaccgtctcgccgttggctttcagccggtcggcccatgcgagccattcgtcggggtcgaagccggccgtcgtcttgcgcgccggctcaccggcttttgggccggcatcgtgggccgatcccgtgtcggaggaacggtccgggccggacatggtcccttcgtgggattccgcgggctcaggttctgcgtggcccgcatggccctccgtcgttgggcccggttggcccttgggatatatctcgggcttccggtccacgtggtccttggtccggccttggtccgattggtcccggtccgtgtgattcgtgggctcgatggccggtgccggcgtggtggtcgtcggccatgtgaggtcctggtcgaacgggatgtcctccgccggatcctccttcttttcccgattcgcgtcggtttccgccggggccggcggatcgaacaggtaacggtccaacgggctcggggatgcgggttccgccgtcttggccggctccggttcggtcatcggcgtggtgatggcccggcggggttccttccggaccggttccgtgacggccgggtccggcgtggttgcggcgggtccggcgtgcccgttatcggggccggcggccttgccggtggtcctggcgagcttgtcctgccggtcgccggcgatgatcacgatcaggtgggtagagtagagcagggcgatgggcgggatgctcatgattgcgggcgcgccccatgtggggagcatgccgccggcgttgagccatgcgtgcaacgcgttgcccgtcacgctgaacagcgagaacagcacgagtccggcccatgggtaccagcgtccgcggatgtggcctttgcggaatccccatgtcgcccacgtgcacaggaggatcgtgccgtccacgcacagggggcctccccatgacaggagcgggttgatgccgctggacacgaacacgagcctcaacgcgtcgaacgagagcacgaacgcgatgaccgcgatcatcacgcccaccgtcacgccgggcagcatgctcacgctctcccgcccgccggcgttcccgttttccatggttttcctatcgttcatcctggttcctctccggccggccctcatggccggccttctctgctaacgggtcaggcgcattccgacgcgacggtcaggatctggtcgaacaggccgttgacctcgtcctggtcgcggctgcggtcgttctcgtcggcgggccacatgtcctcgaggtcgtggtcgacgaggcgcatgaacgggcccacgttggccagcacgcccttgatgtcgcggccggcgcgggtgacgatctcgtcgacggtctcgctgcctggctgccagcgttcggagctcatcagctccacgaggcgggccagtccggcgttcgcgtctcccgcggcggtgcggaacgcttccacgaagttcatgtcgtccgcggcgagccggcctcctcccagatcgatcgccgtgtcgtcgggcagcacgccgatcgcgccggtctcgtcgaccggtgcgggggccgcgggttcgagtccctcgctcatgcgccgcatggtctcgcgtttgatgctcgcgcagatcgtggattgcgccaggtcgagcttcgcggcgatctcctgctgggtcatgccctggccgccctcctcgacgggcaggttcatgtcatggatcttcgcgtcgagctcgaggcgttccgccggcgtgagctccggcacgctgtggcgtttgccgtccgcacccacgaccggcttcggcttcgcggcggcgcccttcgcctttttgacggccttcctgaccgtgccctcgctgactccgagcgcggccgcgagggacctgttgctgatcgggtcgtcctggaagctgaggatgaggttggtgcgttgctggacggtgagacggaccgcgtcggcggtgaacctgtcctggcatagctggttccagccgatcagtcccgcggggtatccgagggcgatccaggcgcgtccgtcgtatgcctgggcgatcaggtcgtgcaggcttttctggcttttcgcggtctcgtagagctgttcctggatgtcgccgacgagctgttcggcctgttcgcgcgtgaaatcgctgtggttcgtgtcgacgcccatgttgacgggcaggtggtcgcgcgtgtattcgatgaccgcgtcgcctgccgtggcctcccccggttccggctcgtctatgatgcggatcggctcgggcgcgccctcggccggctccggttcctccacggcgggcacgtcgacgatctcgacgtcctgccatgcgggggcatcctgtgaatatcggggttcactggcggtcggctgggtggggttgatgtaagaattggtcatgattggctccttctggtccgacgattggtcttctggtccgacgattggtcttctggtccgacgattggtcggggtcggtcttgccggctccttctgatgtgatgattggtggggttggcttctgctggttccctcgcccgagccggattcgtccggcaaggggcaatgcaaatgggtaaaggatgggaccatcgcccgcacgcgaacggcaattcgcgtgcgggcattctctttttcacggaccgtcccgtgcgcccgatatcacctgtgggacgcgtggatggatggaacggatatcgtctccaagcacaatcgatcggcggtcatgatggaagacaacactgcgggcttctccctcgtcctccgccgccgtctcatgacggtggaccggatatccgggttcctgcaaggcgcatcgatgcccctgcgtctccatgtctccccgatcatgacggtccgggcggctctgcgttacgaggcgctggcccgtgacgaaacggtgctcgcgcggcgggcgcgtctggcctggctggcctatcgcatggccgtcgccgatggtctgttccgtaatgtcacggatcccgccgtcatggatgggctgcgttggatgctgtccacggggatcactgacggcgagctgttcgacgcagggctctcgtccggcatcgtgctcgccgccgcgacctgtgacgacgcgtatgggttcgttcacgacgtcgcttccgcggtcgccgaggggcgtcgatccgctgtggccgccatgagccgcacgcgcttgtagggttggcattcccggttctctcttttcactgcagatgggtggtggatgggtttgtttcgggtaagggatggttgttcatcccaccgggatgggccggcaagcccgattcccggtgcgcgtggggacggcaatccccgacgcaagtctcttatgccgttcgaccatgacgctacgcgccacgacctggtcctcgatacggacgccggcggcgcgcaggaaacggatgtcgcgttccacatgctcgccccgcagcaaagtcgcaccggacagaatccgttcgatcccatccacgtagatactcaacggcaaacggctcgacaggtccacgttcacccctcctgccggcacgctcttccagccgtcttccctgacgggatggaagaacgcgtcgaacaccatgcgacgcgcctgcctgtcgacgatacgcaatccgacaatctccccgcactcgggagtcggtccggtcacgcacaaccgaagccacaacactctctcgctcatgccgtcaccccttcttgacatccaggctcgggactatcggaaagtccataaatataatccgtagagacattgaatgccttcgcgatgttcagcacatctgatgaactcatgcgagtctttccagccaatttcatggaagccgtgccctgcgagcaatgcagtacctcagccgcatatctctgctgagtcatattggcctggcgacgcaaacggtccaccctgtccgccatcagtttatctatcgttctattgggcatacctatagcatagcatggtattggacaaaccaataaagaagaaggtatcattgctttatgagtacttcaccaatgaacaaagagacagaaatcactgacaacggcctacctaaggttttaagtcaaattattaccgacaacgtatatttccttaagcagcgtcatcgcgttcctcagacgagtatcgctaatgccatgcacatcactcaatccactctaaacctgaagctgggagggaaagttcgatggaacgccgacgatctcgcatatctatccgcattcttcaatgtctccgttgcatacctcgtgacgaacaatgtcaccatgccatcagaccattatcagctgcgtactcagtacgcagctgataatgcaatcccatcccaagagctggccggtgccgccggtccacgctacatcgtgaggccagacgatgccgagaatacgaaaaagcgcggagcgaacaattcgccccgcgccatcgtgatgccgtatgacccggactttttggtgccctcggtgggactcgaacccacactgcgcagattttgaggctgcttcctctaccaattgggatacgagggcgtgccaaagcactctgaagagagtagcataccaattcgactcttgcgacacaagacacgcgccaatcctccattccccccggtgaaacaggcgaaacacgtcgatatcgcggacggcgcacccgtgtgttgcccgttctcctgcgtggtttcaccgcttacaatgggctgtagtttcgatgtatcgcttttgttaggagggcttatgagcaacgaaacttaccgtcagttcgatccctggcgcccctctccggtcaaggagatttcccgtagacagattgtggagacgcattatttcaatgtcgatcacgtctcctatgagtcgaatcaaatcggttcgtttgaacgctactttgttcaggagaacaatggcgacactgtggctgtgctggccgtcaccgatgatggcatgattccgctggtcgagcagtatcgcatcgccaaccatcgttggacgttggagattccggccggtcacgccaacaacccgtccgaacgcccgaccgatgtagctaagcgcaagctggccgaagaggccggtttcgacgccaccaagcttacgcagttcacccgttttatgaacacgccgagctattccacccagcacaccgcaatcttcttcgccaccggtcttaccccggcttcccgtcaggaaatcggcccggagactccgcgttccgacgtgcgtatggtgtcggtggacgatgcctatgagatggtggtcaatggcacgattgtggatgccaagaccatggtcgccattttgcgcctgaagagcggcacgctcgatcatctcaacgactgatcgccacgctcgatcaccgcggtgactgtgggccattgcaatcaccacacaatcgcaacataacagataacgaaagcccccatccactttggatgggggctttcgtgtgctatatgctagctgtcagcagctaccagaagcctgaaatcagtcgcaagcgccaacggtgtgcacgtagatggagtcagtgcggcccggctggtgatcgccctgagcagagctcaggatgacgatcttgtcgccgtcagcaaccttgccagcatccttgaggaccttgtccgtgtagaccatgagatccttgcgggacttgtcgtggtagtcctccttgagcaggaaggcttcggtgccccaggacagagccagccagtggtaggtgtgctcgttgctggtcaggccgtagatcggggcggccggacgctcacgggagacgcggtgcacggtggcaccggtctgggtgtaagcaacgatggccttggcgttgagcttgtcggccaggtccacagcggcggaggagacagcgccggtggaggacatgtcaaggttcttgagctccgggatacggtcgaagccgtggtcggtggcgtagccggagatacgggccatggtggccacggtcacatccgggtacttaccaacggcggtctcgttggaggtcatggtggcgtcggagccgtcgaggatggcgttggcgcagtcggaagcctctgcacgagtcggaaccggggagttcaccatggagccgaggacttcggtagccacgatgaccggcttggcgtactggcgagccagctcgatgatgcgcttagtggccagcgggacctcttccagcgggcactcaacggccatgtcgccacgggcggccatgacgccgtcgaaggtcttgacgatctcttcgaggttctccagagcctgcggcttctcgatcttggcaatgatcgggatgcgacggccttcctcgtccatgatctcgtgggcgcggtcgatgtcggtggcgaaacgcacgaaggacatggcgatgatgtcggcaccggtgcggatggcccaacgcaggtcggcctcatccttctcggtcagagccggcagggagacggcgacgcccggcaggttgatgcccttgtgggaggacacaggaccggccacgacgaccttggtgtacacgttgttgccctcgaccttggtgacctcaagacggaccttgccgtcatcgatcaggatcgggtcgcccgggtggcaatcgcccggcaggcccttgaaggtggtggaggtgatgtgctcgtcgccctcgacgtcatcagtggtgatgacgaattcctggccgagctgcagctgaaccttgtcttcgccatcggcgttcttcttgaaccaaccgcagcgaatcttcgggccctgcaaatcaacgagcgcggcaacgttgcgaccagtggcttcgctggccttgcgcacgttgttgtagaccttgaggtgatcctcgggggtgccgtgggagcggttcagacgagcaacgtccataccagcttcaacgagcttcaggaggttgtcgtaatcctcggtggaaggaccgatggtgtctacgatcttggctttacgcatgaatgcctgcctattcttgttcaatttggttcgaggcgcgattgccccatttgccgaaacccagtctactagcgcgagccgactcatgacaagttttcttcacggtgtgttgtgagcgctcacattgttgtgttgactgggtttaagggttgtattctctaacgatttcaggccttttcagcgctttccatgctcttcatcttgatcacggaagccacggatgcgccgccaattgcgagcacaatcacagccagcgacagccatgtgggcacctccggcacccaatggacgccttcgccgccgttgatgaacggcaaggtattgccgtgcagggcctccatgatgagcttgacgccgatgaagcccagcaccacggacaggccggcaggcaggtagacgagcttgtcgagcagagcacccagcaggaagtacagctgctgcaggccgagcagtgcgaacacgttggaggtgaacaccaggaacggatccttggtcaggccgaagatcgcgggaatcgagtcgaaagcgaacatgacgtcggtggtgccgatggtcaggaacacgatgagcatcggggtccagtaacgcacgccgttcttggtggtgcgcagcttctcgccgtcgtagtcgtcggtaatcttgatgatcttgcgcagattacggatgatgccgttctcgtgatattcctcatcttcatcgccgccgagcaccagtttgacggcggtgtagatcaggaaggcaccgaacaggaagaacacccacgtgaagcgggagatcagggccgcgccgatcagaatgaaaatgccacggaaaatcaaagcaatggtgatgccgatggacagcacatacttctgaatctgcttgggcaccgcgaagttcgacatgataatgacgaacacgaataggttgtcgatggacaacgagtattcggtgagccagccggaatagaactcgatggcgggcttggagccggcgaagaaccagatgcatccgccgaagatcagcgccataaccacgaagaaggcgatatgctgcacgcattccttggtggagggcacatgcggtcgacgcccgatgacgaacaggtcgacgataaagaacaacgcgagcaccacgaaggtgatgatttcaaatgcgagtggggtttctgccatgattccctacactaacttatgtatgtgacggttttggggccgttccggtagcgctgatcgccaggcagtcaggggatgtgttgttcgacacgctccgggccgctcaggccaagtctttacggtcgacaacgcatcccctgactgcccgcctcgggtatgggaatttggttacttgttggcttccgtcatttgacggagttcttttttgaggtctcggatctcgtcgcgcagacgggccgcaagttcgaactggagttgttcggcggcggtgtgcatctgttcgctcagttggcgaatcaggtcggcgaggtcctgcgcgggcaggccggccttcaggatctcctcgtggcgtttgtctgcctcgttgggatcgagtaccggcacgcccaggtgcgtgttgccggccttgcccgcgttgcggtagccaccttcaagcaaggtctgggtgtccacatcctccttggcgagcatgtcgttgacgtcgctgatcttcttgatcaggggcttgggatcgatgccatgctcctggttgtaggcaatctgcttggcgcggcgacggtcagtctcgtcgatggcttgccgcatggcttcggtggtctcgtcggcgtacatgatcaccgtgccggacacgtttcgggccgcacggccgatggtctggatgagcgaacgataggagcgcaggaatccttccttgtcggcgtcaagaatcgccaccagcgatacttccggcaaatcgaggccctcacgcagcaggttgataccgacaatcacatcgatcttgccttcgcgcaacatgcgcagcagttcgacgcggcgcaacgtatccacatcagaatgcaggtattcgaccttgatgccgcgttccagcagatagtcggtcaagtcctcggccatcttcttggtcagagtggtgaccagcgcgcgctcgttcttggccacacgggccttgatctcggcgagcagatcgtcgatctgccccttgaccgggcgtacgtcgatcttcgggtccagcagaccggttgggcggataatctgttcgaccaccccatcggacagtcccatctcatagtcgcctggcgtggcggacaggtacacggtctggccgacgcgctgcaggaattccggccatttgagtggtcggttgtccatcgcggagggcaggcggaagccgtgttcgaccagcgtgcgcttgcgggaggcatcgccctcgtacatggcaccgatctgcggcacagtgacgtgtgattcgtcgatgaccagcaggaagtcgtcagggaagaagtcgagcagcgtgtgcggcggggtgccagcggcgcggccgtcaaagtggcgcgaatagttttcgacgcctgagcacacgccaacttgggtgagcatttccagatcgtaggtggtgcgcatgttgaggcgctgcgcttccagctccttgccttgtttgcgcagttctgccaggcgttcgtcgagttcctcgcgaatggttttgagcgcccgttccatgcgttcggggccggccacataatgggaggccgggaagatgtggacttcgttttcctcgtcgatctcgtcgccggtcagcgggtgcagcgtggagatgcggtcaatctcgtcgccgaagaattcgatgcgcacggccagttcctcgtagacggggatgatttcgaccgtatcgccgcgcacgcggaaggtgccgcgcgtgaaggcgatgtcgttgcgcttgtactgcatggccacgaattggcgcagcaggtcgtcgcggttgatttcctgcccgactttgaggaagagcatgcgaccggcgtattcttccggcgtgcccaagccgtagatgcaggagacggtggccacaaccacgcagtcgcggcgggtcagcaggtttgcggtggcttggtggcgcaggcgctccacatcgtcgttgatgttggagtccttttctatataggtgtcggtctgcgggatgtatgcctcgggctggtagtagtcgtagtagctcacgaagtagctcacggcgttgtccggcatgagttcgcggaattcggcgcatagctgcgcagcgagcgtcttgttgggctcgataatcagggtcggtcgctgcagcttttcgatcagccaggcggtggttgcggttttgccggtaccggtggcacccataagaaccacatcattctcgccgttttcgatgcgttcggccagttcggcgatggcctgcggctggtcgccggatggcttatatggcgatttgacgacgaaaggcttgtccgcgcgctcgatattgaatcccatagggcctcatcttagcgacctgcgcaccatcctgcgtatatctcacccacttgggccagcatctcgggcaatggatgggtggagtcgatgacgatatcggctatggcccgccgctcctcctcactggattggtggcggatgcgggcctcggcctgttccaggctcatgccgcgttcctcgaccatacggtcgagccgcatgcacacgggagcttcgaccgtgacgatatggtcaaaggcgaatggaatatcgtcaatgacctcggcgagcagtggaatgtcgtgaatgatgatggctgcctcggggtgctcatgctccagtcgcgccgcctcggcatagatcaatgggtgctcgatggcgtcgagccgttcacgtgcgcccggcgcggcgttcgcgccgaagacatgatcggcaatccatggccggttcatagtgccatcggcgagcaatgcatcaggaccgaactcggcgacgatctgtggcagcgccactcccccgggttcgacgatctgatgcgccagcgcatcgtagtcgatatgcaacgcgccgagttgcttgagttgcgccgccaccgtacttttgcccgcggcgatgccgccggtcagtcctattcgcatcatggtgcccatgatagctggcgctcccctcggccggctatcgccgacagctcccctcagggaggggagccggctcgcgtagcgagactgaggggagtcattggcggataactccaaaaacacaagaaacccggcccaatcggaccgggtttctttacacgctaagcgctagcttcgcggcaaactcacttgccgagcagctggtcgcgcagggcggcgagctgatcggagtcggcgagggtaccggtagccggagcagcggaagagtagttggaggtctcctcgaccggcttctcttccttcgggccctggccgtcggcggctgcggattcggcagcgttctccagctccttggccacgaactccttgtgctcctcccacagctcgtgagcggcggcgtactgagactcccactcctcgcgctgcttctcgtaaccagcgatccactcgttggtgttcgggtcgaagccttcggggtacttgtagttgccctgctcgtcgtactcggccggcatgccgtagatggccggatcgaagtcctcggaagccgggtcaacggagtcgttggcctgcttgagggacagggagatgcggcgacgatcgaggtcgacgtcgatcaccttgacgaacacggtctcgcccggcttgaccacggtctccgggttctcgacgtgacggttggcgagctcggagatgtgcaccaggccctcgatgccgtcctcgacggagatgaagacaccgaactggacgatcttggtgaccttgcccttgacgatctggccgggaacgtgggtgcgagcgaagcgctgccacggatcctcctgagtcgccttcagggacagggagatacgctcacggtcgagatcgacgtcgagcacctcgacggtgaccttgtcgccgaccttgacgacctcagacgggtggtcgatgtgcttccaggacagctcggaaacgtggatcaggccgtcaacaccgccgagatcgacgaaagcgccgaagttaacgatggaggacaccacgccctcacggatctggcccttcttgagctgggacaggaaggtctcgcggacctcggactgggtctcctcgaggtactggcgacgggacaggaccacgttgttgcggttcttgtcgagctcaaggatcttggccttgatcttctggccgatgtacggggagaggtcgcggacgcgacgcatctcaacgagggaggcaggcaggaagccacgcagaccgatgtcgacgatgaggccgcccttgacggcttcgatgacggtgccttcaacgacgccgtcagcttccttgatcttctcgatgtcgccccaggcgcgctcgtactgggcacgcttcttggacagaatcagacggccttccttgtcttccttggtgacgacaagggcctcgatggtgtcgccgacctcgacgacttcgtcaggatcaacgtccttcttgatggaaagctcgcgggaggggatgacaccctcggtcttgtagccgatgtccaggaggacttcgtcgtgatcgatcttgacgacggtgccctcaaccagatcaccatcatcgaagttcttgatggtggaatcgactgccttgatgaagtcctcttcggtgccgatgtcgttgatggcaaccttggtgacttcagtgttgttctctgccatgtaaatatatggtttctaatagtggatggataatttctcgatattcagttatacgcacaccctacaggcatacagatattcacaatacaagcaactctgcccaaatttcctaggaaactctaggcgtgtcgttcggccatttccacgacgttggctaggagcatggctcgggtcatggggcccacgcctccggggttgggggtgtaggcggaggccttgtcgtagcaggccttgtccacgtcgcccttgatgcggtagcgaccggcttcttcgtcgtagacgcggctgacgcccacgtcgaccagcacggcgccgtccttgattttgtcgggcgtcacgaatccggccgaacccattgcggcaacgatcacgtcggcgcggcgcatgtggtcggccacatcccgggtaccggtgtggcacagggtgacggtggcgttgacggcgttgcgcgtgagcattaggccaatcgtgcggccaatggtgatgccgcggccaagcacgcacacttccttgccgttcagatcaatgtcataggcgtcgagtagctcgagcacaccgcgcggagtgcaaggcagcggcgtcgaaatgtcgccgcgcacatgcagcaccagttcgccgaggttgtacgggtgcatgccgtcggcatccttggccgggtcgatcatgtcgatgatcgcgttctcgttgatgcccttgggcaacggcagctggacgatgaacccggtgcaagccggatcttcgttgagttcgcgtacggcagcggcgatgtcgtcgaagctggcgtccgccggcagttccttcttgactgaggtaatgcccacttcctggcaatcggcgtgcttgccggccacgtacttcatcgacccggggtcctcgcccaccagcagcgtgcccagccccggttggatgccctgcgccttgagcttgttcactcgctcggcaaggttggtcttgatttcggccgcaatctgcttaccgtcgatttttgtggacatcaacgccctcccctgtagtttcggtgcattctatcgaaacgataggctatcgttggaacaagtcaggattatatatcgttcgctctcacgaagaaggcgtgccatggggactcaaatcacacgacttacgcgactcgccgcagccggcctgagcgccgtcctgttgttcgcgaccaccgcatgcgcagccacctcccccgctgaaaccgagccggacaacaagaccagcgttcccgcaccgaccgggccgatcaatgtggtggcctccctcaatcaatggggctcgctggccgccgagctgggcggcgatgatgtggaagtcacgtccatcgtgaactccaccaatgtggatgcccacgatttcgagccaaagacctcggatgtcgccaagctgtccaaggcccaaatcatcgtggccaacggtgcgggctacgattcctgggccaccaaatcgatgaccaagaccacgaatatcgtatccgccgcttccgtcatgggtgccgtcgagggcgataacccgcatctgtggttctccaaagacgctcgatccagcatggccacggccatcaccgatgcatatataaaggcactccccagcaagaagaaagccttccagaagcggctcaaggcatggcaggcggacgagaaatcgttggaaacatgggcgtccgagttcaccaagtcccactccaacctcacctatgcagccaccgaacccgtggtctattatctgatggccgatcttgggttcaaagatcagacgcccaaggggtatacgcaatcgaccgcttccggcggcgaaccggcacccgcggacctgcagtctttccagaaactcatcgaagacaagggcgtggatgtgctggtcaacaacacgcaggaagccagtgacgcgaccaatatgatcactggcgctgccggtcgcgccgatgtgccggtagtcgacgtctccgaacaaatgcccaaggacgccgacacgctgaacgcctggatcaaccagctcatcaacaccatcatcgacgcggtggatccaagctatggctgtgaagacgccacggacggcgataccgcggacagcaacgcgaattccgatgattccagcgccgaaggctccgccacggatgatgccaatgcgcaagactccaaggccagcaccggttccagcacggaccccaagtacatccgtcagtgcaaggcggccgcatccagtgactcatctcaggattcggcaaaggccgatgccgccaatggcgattccggcgatgcctccggcaacgaccagaccgactccggcaaatagttagaagcaaaggacaccggcatcggattcgtgccaatgccaatagacgccttgcatgagaagggttgtgcgaccattgtcgagatggccgcacaacccttctctttggttatcaccatccgtacacgatattgagaacgattgtcagcatcgtttgccacaatcgggcgttatgagtgaaacttccgattgcatcgtgttcagcgatgccgccatcaagcgtggcgaccatatcatctggcagcatggcaccttcgccattcccaccggttcggtcacggccatcgtcggcaccaacggcaccggcaaaaccacgatgatgagggccgagctgggccttttgccgctctgtcatggcagcctgaccgtgctgggcaagcccgcaggcgagatgaacaaacgcatcggatatgtgccgcagagctatgtggcgaatgtcgattccaatctcaccgccgaacaatccgtgttgctgggcctgaccggcacccgattcggcatccaccccatcaccaaggcccagaaagccaaagcgctcgaggcgatggagttcaccggcatcgccgacaaggcgcggtaccgtctgtccgaactgtccggcggtttgcgccagcgtgtggccatcgcccaggcgttggtgtgcgacccacaactgctgatgcttgacgagccgttggccaacctcgatctggccagtcagcgcgccaccgtacacgtgctggccaagctgaaccgcgaactgaacatgaccatccaggtggttgcgcacgatctcaatatgctcttgccgattctgaccggtgccgtctacttgctcgacggtcacccgcactacgccgatatgcacaaagtgctcgactccgacctactcacccacctctacggcacacaggtgcaggtggtcaccactccgcagggagacatgttcgtgaccccgacgccggatgagctccaggaccagccgcaggatatgcacacggcagccgaagtggcgcaattgcaccatcacgagcacggcaatgccaccaatggcagtgccgccatcagcgccgagaatcgataacatcaagcgagccgacccacagcccatcaacggactgcagctcaggcatggagaaaatacagagacatgagcaccatcaacttttcgtatgatcccgaatggctggatacactgtccgctccattcatgaccaacgccttcatcgccggcctgtgcattgccctagccgccggtgtcatgggatacttcaccatcgcccgtcgttccaccttcgcggcccatgcgctggcccatatcggtctgccgggcgcgaccggcgcggtgttgctcggcctgcccgtgtcactgggcatgggcgtgttcgcactgggcggcgcactggtgatcggtgctttgggcaagcgcgtttccgagcgtgaaatcgccaccggcaccgtgctggccttcgccaccggcttgggtctgttcttcgcgcgattgtcgagttccgcctcccagcagatgcagtcgatcctcttcggctcgatcctgaccatcaccaccggccagatcatcggcttcgccgtgttcgacgtactgctgctggcattgttggccatcatctaccgcccgctgctgttcagctcgctggatgagcaggtggcacaggccaagggtgtgccgatcgggctgatgaacgtggcgtttatggcgattatggccggtgtgatcaccatcgccgtgccggcagtgggcaccttgctgattttcgcactggtgattacgcccgcggccaccgccaatattctggccggctccccattcaaggcaatggtgatcgccagcgtgctgtgcttggtgtcgatttgggccggactcgtgctgtcggcgatgttccccgctcccccgagcttcatcatcgtgacgctttccaccctgttctgggctatcgccaaagccgtggagacgatgcggaagtaatctcatccattttttcttgcccccgctggcgaattcatagcgggggctttgttatatcttctccaccaaggcattggcgatggcggcgatgccttcgccgcggccagtgaatcccatatggtcggtggtggtggcagtaaccgataccgggcaaccaaccgccgcagacagggcggcttcggcttcagcacggcgtgtgccgattttcgggcggttgccgatgatcgccaccgaggccgatgccggcgtatacccgttggatgccagatgcgccacaacttcttgcaacatatcgatgccatgcattccggcaccatgcgcgtccgcaccgacaccgaacagtgaaccaatgtctcccaatcgggcggcggcaagcaacgcgtcaatcagagcgtgcgcggccacatcgccatcggaatcgccttcgatcccctcgtatttggcggcatcggcctcgctgcatgaatcaggcaccggccagtagagcccggcaatccacagttcacggcctgagccagcaggcgcaaaacggtgagcgtcaaaaccttgccctatcagcactcctacagaccccatgcagtccccttcgatggcgttgcccagacgaacggcagcaaacgattatgaatcacgaagccccggcgcatcgcataaggacacgaccggggcctcaaaacaatcaaatcacttcttcttggacttcttctcggcttcaacacgagccaaagtatcggccgcggcctcttcgggctcggcggtgtgatgcttgtcgtcaccgggctgagcgggctcgtagcccagattcacgtcgagcagacgctgggcttccgcctcgtcgatcttctcggacaaggcgatctcagaagtcagaatggcacgggccttggtgagcatgcgcttctcgcccgcggacaggccgtgctcgtcgacatcgcgctgggcgagatcgcgaaccacttcggcgatcttgttgacatcgccggtggcgatcttttcgacgttcagcttgtaacggcgagaccagttcatctctttctcgatgatcggggtccgcaggatgccgaacaccttggccacttcggatgcggagacgatgtcacgcacaccgaccttcttggcattgtccacgggaacgttgatgaccaaaccatcggaagagagtacggacaactgcagatattcgcgcgtcactcccttgaccgtccgctcggtaatggcctccaccttcgctgcaccatgacgcggatagacgaccatatcgccgactttgtaagacatgtaccctccgagaactgacggcttacacacgaaaactcgaataattatgccatgcggtctggaccacccctataagagcgctcacaaccacggaaacacaacgaaaagggcaagaattcgccattttcgacgcgccaatgtagcgttttcgacttcaacgcacgtagactttgggacatggctaaagaaacgaagatcaaggaagataccgtcaccgtgcctgtcgcccaaggcgacctcgatgcgacgagcaatgctgaattctacaacccccacggagttctcggcgggcatctcggcatcggcaagcatgccgacaccgccacaatccgcgtgctgcgtccgcttgccaagtccgtgaccatcctcacccaggatggcgaatacccgatgacccacgaatacaacggcgtgttcgtggttaccgtgccggcttccggcactaagaagcagcccacgattcccgactaccgtgtcaggaccgagtgggaaagcggcgcagtgctcattgaggacgacccatatcgctatatgcccacagtcggcgacatggacacctatctgttcggcgagggccgtcacgagaagctctgggagacgcttggcgcgcatgtgctgcgctatgacgatccgatgggcggcgcagacggcacgcccggcgaacaggtggtaggcaccgcattctccgtgtgggccccgaacgcccatgccgtgcgcgtagtcggtaacttcaacgcttgggatggccgccgtcatgccatgcgcgagctcggctcctccggcgtgtgggagatcttcatccccggaatcggcgcgggcgagacctacaagttccagatcctgaacgccaattacacgtgggagatgaaggctgacccgatggagcgtcagcacgaagttccgccgaacaccgcctccatcgtcaccgaatccacctacaagtggaacgatgacgcctggatgcagcaccgccgcaccaccaacccgcatgatggcccggtctccatctatgaggtgcacgccggcagctggaggcagggactgacctaccgcgacctggccaagcagctcgtggactacgtcaagcaggaaggcttcacccacgtggagttcatgccactggcccagcacccgttctccggctcctggggctatcaggtcaccggctactatgcggtcgactcccgtctcggttcccccgacgacttccgttacctggtcgaccagttccatcaggccggcatcggcgtgatcatggactgggtgcccgcccacttcccgaaggatgccttcgcgctcggccgcttcgacggcaccccgctgtacgaggacccggacccgctgcgcggagaacaccctgaatggggcacctatgtgttcaacttcggacgccgcgaagtacgcaacttcctggtggccaacgccctgttctggcttgaggacctgcacgtcgatgcactgcgcgtggatgccgtcagctccatgctctacctcgactacagccgcgaacccggccattggcgcccgaacatctacggcggacgcgagaacctggaggccatcgacttcctcaaggaggccaccgccaccgcgtacaagaacaaccccggcgtcatggtgatcgccgaggagtccaccgcatggccgggcatcaccgcccccacttccgccggcggcatcggcttcggcatgaagtggaacatgggctggatgcacgacaccctcgagtatctgcacgaggagcccatcaaccgcaagtggcaccacaacgagatcaccttctccatggtgtacgcctactccgaacactacgtattgcccatcagccacgacgaagtcgtgtacggcaagggttccctgtacggcaagatgccgggcgatgactggcagaagctggccggcgtgcgttcgatgttcgcctatcagtgggctcacccaggcaagaagctctccttcatgggcaacgagctggcccagtggggcgagtgggatcacgacgcctccatcgattgggattgcctgaactggcaggagcaccgtcaggtccagaccatggtcgccgaccttaacgccttctacaaggcgcatccggcactatggagccaggacttcgacccggccggcttccagtggctgaccagcgacgatgccgaccacaacacgctgagcttcctgcgcatcggtaccaagggcgagaccttggctgtggtggtcaacttctccggtgaggcctggtccgattaccaggtggcgctgcccaccggcggcaagtggaccgaagtgttcaccaccgatgacgccaagtacggcggctccgacatccacaacggcaccttcgaagcggtcgagggcgaatatcattcacgtccgttctcggcgaagatcaccgttccggctctgggagttgtattcttgaagccggaagactgaactggtcaacaggctgaaaggtaaccggtttatttatgctcaataccacagcgcgtcagaatacgacaccgcgcacggtgctggtggtcgaggacgagcccacgctcgccacggccatcgcccagcgcatcaccgctgaaggatggaccgctcgcgtggccggggacggcgcttccgccgtccaggccgcgtcccagctacgccccgatctggtgatcatggacatcatgctgccggttatggatggtctagaggccaccaaacgcatcgtcgccgaacgtccggtgccggtgctgatcctcaccgcacgtgatgacgaggccgacaaggtcatcggtctgggagcgggtgccgatgattacatgaccaagccgttctccatgcgcgagcttatcgcccgctgcaaggcgctgctgcgccgcgtggagcgtgcgaaggtcatcgccaagaactcggagaacgagaagctgctcgacttcggttcgatggtcatcgacccggcccagcgcatcgtcaccgtgaacggcgaacaggtgcatctgacccccaccgagttcgatctgctggccacgctggcccgccgcccgaagtcggtgctcacccgcgaaaagctgctcgaagaggtctgggactgggtcgacgcatccggcacccgcaccgtcgacagccacgtcaaggcgctgcgccataagctcggtgccgataccatccgcaccgtgcatggcgtgggctacgctttcgagccgccgaccgcgtgatggcatccaaaaaacaacagcaatcccggcttgatgcgatgaaacctcgcgtcaagccggttgatttgttctcatctctgaagctggaactcagcgcactgatcgttatcgccactgccatcgcgtttgccatgtgctggttcctcctgaaattcggctggtccggttggatcgccatgccgctgactttggtggtggccttgggcatcacctatttcttctctcgcggcatcaccgctcccctacgccagatgcgcgatgtggccgaagccatggcggatggcgattacacggtccgcgtggatatcgatcaggatcgtcatgacgaggtcggcaagctggctcgctcgttcaacgagatggccggcgaactcgagcatgccgataaaatgcgccgcgacatgatcgccaatgtgagccatgagctgcgcacgcccgtttccgctttgcaggcgatggtcgagaacatggccgacggcgtcaccgagcccactcccaccaatctggagagcatcctcacccaaacgcagcgtctctccgatctcatcgccttcctactggacctgagccgtatggaggccggtgcggcgagtctgaatatcgaaaagttcaacttcgccgactttcttgacgagaccatcgagccgttggaaatcgccgatggtggccacgcccacgacatccgcgtcaccgtgccggccgacatcacgatggaaggcgatcaggaccgcctgcgccagctattcaccaacatcatcgccaacgcgctgaaacattcggccgacggcaccaccgtgctggtcgacgcccacgaggacgaaaaccaaggcaccatcgtgaccaatgtggtgaatttcggctcccagattgcgccttccgaccgtttggacatcttccggcgctttgtcaaaggcaagacgggtcccggcaccgagtcgggcggcaccggtcttggcctgtccatcgcgcgctgggcggcccaattgcacggtggcaccgtcaaagtggtcgacgacacgcgaggtgccgatttcgaaatcatcctgcctaaatatcacatcgccgaacgctgatattgtccgacgtcctaccgtatactgtattcgaacagatgttcgaatacagggtgggaggcgcagcatgacacagcaatccgagtcacaggccatggcgcacgaggccacgctgtttgttatgcagatggccggcgattccatgatcaatgcgggtattcacaacggcgatctgctgattgtcgatcgttcgttggcaccagtccccggagatgtggttgcggctgtcatggacgacgaaatcgccatcaagcggctggtttcacgggccggcatcaccatattgcacgccgagaatccgcgataccccgattacatgccgagcaacggcgcttcgcctgctatctggggcatcgtcaccgatgtcattcacccgttgatatcgtcatcggaccgtcgcaccacggcatccgccaataccagcacgcccaccaccttggtgccggcctgctgaaacgcctgaacgcattgccgcacagtggcacctgtggtgacgatatcatcaacgagaagcaccgcgtcgccattgccgatgagatcacgcttcaccctgacatgaccggtgatacgacgggcacgctgtgccgaagagacctgctgcacggagcgtgccttggtggaggagctcagggcattgcatggtcgcgcatcgacgccgtacccacgcaatgcccctgccaccgatttggccaacggtgccgtatgggcacgtcctcttcggcgcattgacgcccgcgatgatggcaccggaaccaccaatacgcgatgacccaagcatgatgatggtattggcgtcttgttcagcagcgacaccatgatgcggccgaacgggccgtcaagctcggtatcgtcgtggtccttccagtcgagaatggcacgacgtaccgctccctgataaatcgatgcggaccatatacgggctccgccaccactgtctgcatcccgttcccggcattgcgcgaacagggcccagcatgccgcacacaatacctcatccggcgcgtcacacccagcgcagccgcgtggaaacagcagattgcagacctgtgcccacatcgcatgccaccacttgtatacgctcggcccgtccataacgcgtcactatcgagctggagtatcgaatcgcgcaagcagtgcatccagcagttgtaccgtatcttgcggattctcaacacgaacaccgatcgcaccggcctcaaccgcgggatagtcattacccgtaggcgtcatgcgatcacccacgaacaccatttcatcggcccgtatgccaagtgtctgcgtcagcttgcgcacggcataggccttatcgatgccgcattcgctgacatccacactggtgtatccgccggccctgacccgcatatgcggcagatcggccttgaccgcttcgaccagcgcctgtttcttcgtgttatcgcgatcccatgcctgcttggccgctacgggcgcgaactgcccaagagcggagaaggtgatctggctgcccctgttctcgattcgaggcccccatacctgctgttcccacaatcccagttcccgggcatgtcgctcaagactttccgagacagcggccacggtggcttcggacagatcatgcgcatacaccaaggcccattgcgtgccatcccaccggtaataccgggagccggaggtaggcatgacatgcagattgccgcgcctggcattcggggtgagtacatccagcacctgcgaggtgaccaccgccatgccgccccctgagatcagggccaccaccgtatggtcgagcaacgcacagaaccgttcgatcatcgcgggcttcatcggctgttttgagctggccagtgtgttgtccaaatcgaaaccgaacaccttggcgttggagcagacattatcgaaatcaagttcggaccacgaacgtaccaccatttgtcgtgcctccctcgttgacgaatgttcacagccaatgaaccaatcctaacgcatgttgcctccgccatgccctatggtgggaaccatgcttcagccaccttggaacgcacgaatctaccgcaaccgccacggtcgcggcacacgaaccccgatgttcggcacccgtctgccccgttaccgcactcgcaccggcatgttcgacgatatggtggcggcccaggttcgcaggctcggccaagcgtggccggaactgatacgtccgctccagttcgcggtggaggatgtgccgccttcggatccgacgccttggcagaccgagccgaatatgacgtcccagtgcttccccgccagccacggcattcccgcacgagtcgtgctctaccgcatgccgttgcagaccgaggcacctaccaagctcgaactgcaattggccgtcagggatgagctggtggcccgcatagcggaattgtatgggcgcaggcccgaggaaatcgaccccgactggggcctgtgacaacactgcgggccgtgtcacttgtaataaggtagtggcacggcccgcagctatatcgccgccgaaacatcatcaaactgacgcttcggcgagcatacccttctacttgacgatggaggaatcgttccgagcccagacatgaaccgtggcgggcatcagcgttgaagcgtcgatgacggacaatccggcgatgtccttgtcttgcaacgaatcgtgactgaaccgcgctccccagctcactttcttggatgagtcctccaacatcagcacgaccgcggtgccatgatcgccggaaagattgccggcttcaatcgtttgtgctgcgttcgcatccagtgtgatttccttggaggttaccgaagcaccggcatcatcgtaggcgcgcaaggtgaccgtcctgcgcgcattggacgtattggccagcgtgatggaggcctttactccgtcgggaagggccaaccccgagaattcggatggctcgccggcattgaccaatgcgaaatcggcttggccggagtcaccggagcgtgtggccttgacggagaacgacacggcgtcctctgcggtggacatcacgcccaacgccccatcaggagcttctcccaagtcgatcgccgtcactttatcagcagtgacggtggcatctttggcgggaaccaagcctttggcggtaatccatgacagcccggtgctggtgtctgccttggcgaacagataagcggtgaccgcatcgccggcagtgatggacggcgccaccgatgcattggatgcggtcggcagcggcagcgcgaaatcagaacccttcggtgtcagaccatccatggtcaccgtgcgcaccacggacgcgataggagtctccttgctggaaacggtcacgaacagaccatgctgcccatcgaccgcggcggacagttccatcgaggactccccctcggctggcacagacagcgtggattgggtggacaatgccattttcccggctgtctcggaaccccagacggcaatgtcgacggtggtcggcttggtggagagattcgagacgatgagctgctgtgtggtaccggtcgtgctgtcggagagcaggaacgactggctgagcgaggtcgatacgcaggatgccgccgatatgcctctcacatcgccatcatcggcccatgatgcgatggtgccgacggtgccggtgccagctgcggcctgcagcatacgggtattgatcagacgagctccctgattgatcttctgagcaccggttttcaccgaggaatcgtcggtcgaatcggcgtctttcaaagttacgtcatctgaactggacttttgcccgatcgccgagacagtggcgctgtagacggaaccgaacgccgcatagcgcgcttgtgtgctcagattgccgacagtggcctggaaggcgctgtcgccgtacgtgccggtatcggccaatcctataggtgccgggcagtaggtttcggactgggtcggactaacggtctggtcgatggcattatcggaagcggccaccttatccacccagatattggggatgggggccatgacgagaacgacgaacagcgcaatcaacaccagcatggtgatcacaccgagcacgatgccgatcgcacgtttgaaaccagaagttttgttgctcatgcctgctcctccaatccgtaggacggtcgtctgcgaggcatggcgaccaagcagtacaacgccgtgatcacacctaggcatatcagccaggcgtgcctccagacactatgctgtgcacgttgctgccatgaggtatccacctgctgtgaggcgctgctacgcagcgtcagacgatagtagctgccgctatccgtggagaccagggactgggtgccgttcgatgcggcgatattcgcgctcaactgttcatacggcatgtcgttcaaggaatcgccggtctcgggaaccacgtagatgccgccgaatccaagcgcgctgatggccgcgatggcctcttcgtcgggattggacagcagcgaggcacaggcctgggccagttgttcgtcaaccgcatcatgcttgccggacagcaggcgcgcccgctggaccggagagctgtcgatcaaatcgccgcgcgaggtgcgcatcaccgcatagttgacgatgttgcgggtctccgcgctcacggcaagcacacgatgatcggcaccggcctccagataatcggtggtgaccatgggcaggccgttttcagacacgcccagtcccgcatccttatgacgttcgatgccatacatgcattggatgccaatgcagcacaccagtatcagagcaagcaccacacggccagacacgatgagcacatgcagacggtcctttttcgatgcgggatcactgccaaacgcatgcaacggttggaatcgcttcaccgccccaccagcgacgagacacacgcaggcgaggaagcccaatatcatcatcgcgatgcccggctgcgcggaaccggccacgacaccatcggcatccacggttatggccacacggctggagaccagggcgagcgcgcctccgcaaacgattaccacccacatcagccgcgaggtccgcaacgcgaacggcagcaccagcgaagcaagagcgagcagcgtgatgacgccgaacagcacagcgaccgccaaatcggcatgctcagtcgatcccatttgccatcccagcgcacgctgtgcggcctcaagcaggctcagcgacgccggcgacccgttggcggatgacgttggcactgtgatgtcgccgaacagttgacgccacatgcccaaatcggcgtaacgcaccgcattgacgagcgtaggggccaccgcaaaggcggcaggaaccggaataagcaacagcatggcgcgcttgcggcgcacgaacagcaggaacatcaggaacacgacgatcagcgcgaacagcagctgcggttcggcggccaccacagggatgaagcacagtgcggcgatggccgcggcctgaacggatgtgcgcggcttgagcgggtcttcggtatggtacatgcccacggcacggaacacgaatgcgaacgcggccggcaggaacaccattacggtgagcatcggcatattggcctgcgcataccagccgaacataatgccggtggatgcccacaacagtcctcccagcacacgaaccacgtccgagcgggtgaatacgcccgccagcgcccagaacgacaatgcgctcagcggcgcggccacaaacagtatcatcgccagagcggcggtcacatggccgagcgtgaccagcgaggccagcatcagcaccagcagccacggcgtgggcggcgcaggaatgccggtgccgctgccaaacacccatggcgtggtggcggactgcaccagttgagtgaagctggcaccggtggaaagcaacacatcggaatacaacgatccaccggagaatatcgaacggaacaccggccaatacatcaccacgatggccgcaaagcacaccagcgccatcaccacggctgcgctccagcgatatatggtgcgtgtccgcagatgggcacgttccagcggactgagcagcactctgccctgctgggattggaatgcatcccgacgatcatggaactgcttgatctgccgactgtcggcgaacaaaacctgcagggacgatgcggcgaccttcgactgtctggccaccagcctgcgcgatttcatgtttcccgcgatatcggccaaagccaaccatggcaggcacaattgcacccatgcttcatacggcttcttgccgaacatcatggctatggccatgccaaaactgcgaatcagcctccacagccagacgataatccaggacgacatggccaggtcagtgtacagatagcgctgttgggagcgatgcaccgtcatcgcatgattgaccgtgtgatcttccttaagcggctccccgcctcgcgtacgaatgccctcataccgtgcgcgacgatgtgatatctccgcttgcgggactaccaccacgcgtccgccgctcaggcagacacggcggcagaaatcgaccgattcgctgtaggtggtcagccaggcattgatgccccgcagtcgcgtgaattgcgacatggacaccagcgcgcccgccagcgacaccgcgaacacatcctgtcgcccgtcatactgctcctgatcgggttctccatcgaccaccagggaatgcacggcgtgtcggcctgcatacataccgacatcatgcaggtgggatccttcccaatcacactgtttgcacccgagcacgctggcacccggcgtattgcgccacgcctcaagcaatcgttcaaggcatgaggcatccgaggggcgggaatcatcatggagcaaccacaatgcgcggggagcgtcatccaaatcggcccgatccaacgcccggctgaccgcatcgccgaaggaacgcgcgcccttggccgaaacgatgtgaatggtcacatgcttggactgcggcacctccattaccggccccgatggcgagggaatgacctcgaacgaagtggttatcctcgaaccggcgcgcccggtcgcgtcggcgatgatgacgactcccggaagaacattctgcgtcaataccgaacgcaatgtagaccggaggaaacgcatatcctcctcaacggtgatcacagccgtaatgccggtatccacatcctgcctatgcgtatacggtcgagaagacatggcgtcggccaacgcctcatgaatatcgctattacctgtcggactcataaactcccagtgtacgcaccagacttgaagggggtgtgtgtggaactacgcctgctcccggtgctctcgcttatatcgacggcgttcgcgctcgctcatgccgccccaaataccgaatcgctcatcatggtcgatggcccatttcaggcattgttcacgcacttcgcatttggcgcacacacgcttggcatcacgggtcgagcctcccttttccgggaagaacgcctccggatcggtttgcgcgcacaacgccttgtgctgccaagatacatcgccatcaggtcggaatagtccccacaattcatgccatggctcttcggctgaatcgtcgaccacaccccacatgcgattctccttgcctattgagcttttcatacggactaaattacacacatgcaatttcgtttttgtcaaattctttctcgtgtcattacatcatttttatggaactgtgtgctatggcgcggacacgatgccctgatgccgttgcacatgatattgtgccgttcctgcgcaggaacaccatagcgcaggaacacccggcggatgctgtgtcaaagtgtcattcagacaatcgacagtttcaggaggggttatgacgcaggaatcaggtggggcggatccgcatatcaacccgccaagcttcattcctgcgggaaatcgacgcacccgaccttccgggcaggtgccacgctccttcgcccctgcccgcgcctcacgtcagtcaggtcaggctccatcggcccgtccgtccgtcacgggaaatgacatcgaagagcctcaaccgaacgccaacgccacggcaagcgccaacgtcacggacaacggcaggcggactccgcccagtttttctccgaaaaccggacgtgccacccgcagcacggctccggatgccgccgcaccgcgcagcattccgccgtcgcgagcgcggatgtcttccggctcatcccgcaacgccgtgcgcaatccgtcggatatgtcggtttcccggccctcatcgccagcagcaaacgtgtccacgaagttcagccatcttggccggccggcggcggcaacggcgaaaacggtaacggcacaccggccgcgcgccttgcgcatcatcttatgcgcgattgcggtactggtggcggcgttgattctttctgttttcggtgcctggcaatgggtggacagcaaactgaaccggagcgactggctgaccgacacccccaacacgccggcctcgacctggctgattcttggctccgacgagcgagacggttccaccgattacggcggcgtggacaatatctcaggcttcagaaccgatacgattctggtgctgatcaagcctaaaagcgggccgagttcgctgatttccattccccgcgattcgcttatgaacgtcgataaccagtacatgaaaatcaatgcggtggcgcagattgccggcaagaaagccttggtaagcaacgtcgagcagattaccggccagaaaatcgaccatgtggcgcagatcaagttcggcggtctgcagaacgtggtgaacgccttgggcggtatcgaactgtgctatgacgaggatgttcaggattcctattccggactgaactggaaggcgggatgccatacgacggatggttccactgcattgtccttctctcgtatgcgatacgccgacgcgcgaggagacttcggacgcaacgaacgccagcggcaggtcatctcggccatcgtcaaaaaggcttccagcagtgggaccctgaccaatccgtccaaagtcgtggcagtgtccaatgccgcgatgagcgcactcaccgtggatgaaaaaaccaacccttacacgttgctcaccatggcgttggcgttcaaaagcgccaccggctcgaatggcatctccggcagcgtgtactggtccgaccctgattattacgttgatggcgttggctcctcggtgctgctcgatgacgccaagaacaccgaactgttcaatcagcttgccgacggcacgcataaggccggcgccgtgggcaatctggcggaaggctgaccgacgctttcccggagcccatcggcttcatcgtcggcgcatgatcgccgccgttgcccacgcagccaatcatgcactggcaagatgtcatgtggataactcggcaagctggaaccacataccttgattcggcttgcgctttcggcatgcgttcccccacgctggaagcatgacatcacagcagaacgattcgaagcgacattccgcccacacggcatccgccgtatcccgggcgaagcaccgtttgggcgcgccgccattgcgcgcccgcctgaccatgcttgccgcggcgtgcccgatgatcgcgcaggcactgatgatggtcatactgctgttgcacgggcaatggctgttcgccgccatgatcgcaccgggcatattcgcctgtctcgtgtccctgctgctgacgctcccctcgtctccgggtccggagaaggctcccgccccgcaacaggcaacgatcgatgtcggtatcgcggacgacgccgatgaccgcgccgcagacctccgtcatgcgccgtcgcagtcgatagaatcgctgctgcacttcgcacgcctgccatggcgcaccattgtgggccactggcttgagccccttaaccttgcggtgccgattggcatgaccggaagcgagccgctgatgctcgacctgaaccgtcagggaccacatgccttggtagccggcaccaccggttccggcaaatccgtgttgctgcaaagctggtgtctggcgctcgcctcgatgaacgggcccgaacatctgaatttcgtgtttttggacttcaaaggcggttccgcattccgcaaactcgaacggctgcctcataccgttggcagcgtatgcgatctggatctggcgcatgccgtacgcgcgttgcgtgcgttggaaaccgaactgacacgccgtgagcagctgtccgccgctatccgtgcttccgatatccgcgatatggtcaatccgccaccgcgcctgatcgtggtcattgacgaattccatgccctgaaggaccagctcccggattatgtgaatcgtctggtgcgtattgcctcgctcggcaggtcgctgggcatgtatctgatcgcctgtacgcagaatccgatgggtcaggtcagtgccgatatgaaggcgaatatgtccgtcagcatttgtttacgggttcgggaccgtctgcaatcatgcgagctgcttggtgatggtcgtgccgccgacctcagtccggcaatgcccggtgcggcgttctgcaacgattccgaacaggtgacggcattccgctgtgcaacggcgcgcgatatcgatgcggtatgccgccagatcgcgttcgcatcgcggttcgtcgggagcccgccgcagccgtccctgtttaccgcgccacttccccggcacgtaaaagaccggactgtggccaatcacgcaccgcaacgcattcgatttggacttgccgacgatggcatcaacctgcgagaagcgacggtatccctcaccggtggcaatatcggtgtcatcggcccgcaggggcgcggcaaaaccacgttgctgaaaacattggctcgacacgccagcatggctgatggcttggcggtacgtgtcagttccccgcatcgccgggtatggggatcgcaatggcttcatggcggccgctgcacgccgtatgccagctcggatgcaccaccgcctccgcatatcgtgtggttcgtcgacgacgccgatgagttgttcgacccattccgcaccgacgagcaggcgctgtctttcacacatgcgttggccgatgagtccgtcagcgtggtattcgccgtcagcacgattcgcccgatacgtataccagagcattgcaataccagaatcgtgttcccgtgcggggaacgaacgtctgaccttatggccggagtccccgctcgcctattggatacgatgagtcatatcgatgccgacaacgcgggccgggccgtgctcatcgagggcacatcggcatgtctggtgcagtgcgcttcgtgaaaacttcggttttttctcggtgaaacctcttgaaaatcaccacggttcgtggttaccttggtactggacttaaggaacaacaccagccacggggcttttaagggaggcaagcaatgagcagcgcttttgattggcgagccaaggccgcatgtcgtgacaaggatccggaactcttcttcccggtgggcaacaccggtgcagcctatcagcagattgaggaggccaaggccgtgtgccgcacctgcaaggtgattgatgcatgcctgaagtgcgctctggacaccaatcaggattacggcgtgtggggcggcttgagcgaagatgagcgtcgtgcgctgaagcgccgcgccatgcgcgcccgccgttctcaggccatgcagatgcaaatctgatgttttgattatcgcttcgtcatactaggaaaccctcccacttgggagggtttccttatttttgggcttcgcatcactcatcctgagcggccctgagcttcatatcaagcaccacgcgggtgccgcctccgcggcgcggctcccaatgcacggaaccaccgaaatcattggtcacaaaggtgttgatgatctgcgtgcccaaaccagaaccggaagaacgagccaatcctccctgttcttcggagccgagaccggaaccgtcatcctcgaccaccacattgaggttcgggccggagcggcccacggaaatcgtgatatggccatccttgcggccttcgaacccatgctccaccgaattggtgatgagctcggtcagcacgagggacagcggcgtggcatcctgagcgggcatcatgccgaacttgcccatgtagttgatatcgatgtgctggtctttcatcgtggctaggtccacggccatgcgcagcaggttggcgatcaccttgtcgaagtcgacgacctcgtcggcggtctggctcaatccctcatgcaccatggcaatggtctgcacgcggcgttgcgcctcctgcaattccttcttgacctcatccgacttggtcttacgagcctgaagcctcagcaatgcggagacggcctgcaggttgttcttgacacgatggtgaatctcggaaatcgtagcgtccttggtctgcagctcctgctcacgacggcgcagctcggtgacgtcacggcatagcagaatcgctccgatacggccgttgttgtcatacaagggcaacgagcgcatcgagacggcggaacggttggcgttgagttcggagtcgaccgcggctttgcctgtcaacaccaacggcagggtttccggaacagggtcgttctccttcaatagctgtgtgccgagttcgctgaggtaatggccaggcatggtggtcagcagaccgagacgcctaaagcagctgatggcgttcggggctgcgtatcgaaccacgccgtccatggtcaggatgatgaagccgtccgccacgcgagcgatatggcgttggctcatcaccgaatccttgtaggggaattggcctcgcggaatcatctcgtacagatgcttgccggcgttgatgctttccgactcatatcggccgttggattctcgtgtggccatattggtctcacgcacgaccaagcccaaggtcttgccattgtgccgaaccggcgcgtacacgttgcagacggtcgccttgcccacggttctcaataccgtggagcggaacaccacgctggagagcatggcggcgtccaattcgccgaccatgtcgtccggcatgacgtttcccaccacgtcttccgcccgcagcgtcataacggtggatggacggcattgctcggccaccacgtatttgccatcgccatcctgtaccagcagcagcagatcggcaaagctcaaatcggcgatcacctgccaatcggcaacgagatgatgcagccactcgcggtcctcgtcgtcgaagtcggggcgcgttgcaaggatgtgtgaaaaatcagccatgcccctatcatacgcagacacgtcgccgccatcgcggcaagccacacgggcaagtacgacgactatgacgacatcgcatcttcaataccgcgccaatcgcgttgcacggcttcccgcccgcggtcaaggtgccggcatgttgtttatcgtacacggcaagcatcacgtacagtttgatatccgaagccgccaccatattgccggcattgctgtgtccatggaacccaccatcgcgtttgcctgcgctttggtgtgatcgacgccaggacgcccggcgggaggttcaggagaagcaggggccgccggattggcctcgggctgctccaatgggcttccgcactgcgaacagaaggcatttccttgctcgttggcaaacccacactccgtgcaatacaccatcaccgaaccccttattgctgtgacgttctcatcttcggattccatagtatcgccaccattgggtgatagtgttcgtgtgagtcggtattgacaagcataaaagttacgctaacgtaggttacggcagcgtaagaagcgtatcgtcaactcgtgaaacgggggcatcaccatggcttcaacaaccgacgacgcggaaaagacgatgcatcacgacgctcataacagcgcgacgattgcagaggatgccaccatcgcatccaagcgtcaggcggctatcgaggcgcgcgaacaggcgttgcaggccaaggctgatgccgtacgggccaaggcccagttcaaggccgaggccattcgagccaaagccgaggagaaggcccggcacaagctcgccaaagcggagcaccgtgcgctgaaaatcgagggcattgcccctgcggaagtggaacgcaagattcgtctcgacgtgcacggacgaccaaagccgttgatgcgcggctggattcacgcgattgccgctcccctgtcattggcggcaggcatcgtgcttatatgcctggcacatggcgcgagtctgaagtgggcgtgtgccgtgttcatgacagcgtcgctgattctgttcaccaattcggcctgctaccatctgggcgattggagcccgcgcgtcaccgatgtgctgcggcgtatcgatcatgtcaacatcttcctgctcattgctggcacgtataccccggtttcgtttgcgctggaaccgttctggcgcaatgtgatcatcatatcgatgtgggcgtgcacggccatcgccatcgtgattcatgtgatctggatcaatgcaccacgctggctgtatacggtggtgtacatcatcttcggcatctacggcctggcttatatggtgatgttctggaattcgccgtatgcggggccagccgtggtggtgctgctgtgcgccggcggtgcctgctacatcctcggcgccatcgtctacgccttgcgcaagcccgacccttggcctcgcgtcttcggcttccatgagattttccactgcggaacggtggccggatatgcctgccatatggtggccatctacatggtgatcgtctcgctgtggcaataaacgctacgacatataagtatgcccccgcctacgggggcatactagtcacttataactcaggccagcggcttggcggccttgaccgtcacggacagctcgcggccgttcggtgcggtgtaggaaacgacgtcgcccaccttggcaccttcgatggccttgccaatcggggaatccggggtcatgatgtcgtagtcggtgccggccacgatgtcacggctgccgagcacgtaggtcatctcgttgccgttgagctcgatggtcaccacagagccctcgcccacggtgccttccggggcattctcgatgatcttggaatcgcgcagcttgacggtgagctcggtgatgcggccctcgttcttgctctgcgcctcacgggcggcctggtagccgccgttctcggacaagtcgccctcggcacgcgccacggcgatcttgtgcgcgatttcctcacgcagctcgccttcacgatgggcgagctcttccttcatcttgttgtatgcttcctgcgtcagcaggtagaccttgtcctcagccatatcgtcctcctgaaccgttgtcgatgctgaaacaattttcgttatttatgacaaaacgccggctatgaccccggcgttcgtcatgtgctgacctatggtcagcgggtggaaatgatgtcgatgacgaacaccagcgtgtcctcgccgccgatgccggcctgcgggatgccgcgggaaccgtagccgtattccggcggaatggaaaccaccagacgcgagcccacgttatggcccggcacggtctggtcccagcccttgatgacctgtcccacgccaatgccgaagctggcgggctgatgacggtcgaagctggagtcgaatggggtgtccttaccccacaccacaccgtggtagttcacggtgacggtgtcgccgcgacgcacgatcgggccgtcgccctcggtcagctccacaaccttgaggcccttcggggcttcgggcgccgggaactcgataacgggcgtggtgccgaattcggcgttcacctgaggcatctgatctgccattagtcctccttcaaagacacaatgcgccctaccttagcaccatcggcgaatcggcggtagtccttcatccctgtgcgatacgacacgctggccgtatacgtcaattccggtcatcatgctggtgaataccagacatgtcaatcagcattcgacgacattgacggcaagcccgcccttggaggtctccttgtatttggccatcatgtcttcaccggtctgcttcatggtttcgatggcctgatcgagggtcacgatgtgtgagccgtcgccgagcatggccatacgcacggcgttgatggcggtgttggcggccatggcgttgcgttcgatgcatggaatctgcaccagtccgcccaccggatcgcaagtcaggcccaagttgtgttcgatgccgatctcagcagcattctccacctgttccggcgtgccgcccatgactgcggcaagtccggccgccgccatcgaacaggccgagccgacttcgccctggcaaccgacttccgcaccggaaattgaggcattgcgtttgaacaggtatccgatggcaccggcggtcagcagaaacgtgaccacgccctgttcattggcgttgtccacgaaatgccagtaatagtgaagcacggcgggaatgatgccggcggaaccgttggtcggagcggttacgatgcgcccgcctccggcattctcctcagagacggccaaggcgaagagatccacccatgcggcgtcggaagactcgagcacggcgtctttgcgccggctgtcgcggcgcagcacatcggaattcgaagcgagacgccgatacatcttcggcgcgcggcggggtacgtcaaggccaccgggcaatgtgggctccgccgaggtgcatccgtggtccacgcaggcgcgcataacacgccagatggcatcaatatcggatcggacctggatgcctgagcgtgaagcggtttcgttggcccatacaagttcggcgatgctgagatgatgttcccggcacaacgacaccagttcggcgcatgatgagaacgggtagggtgcctcgacgccgaaatcagtggatgatgattcgtccgcgtcggcaaaggaggtgccttccggaggacgttcatgaatgccgatcatcgggtcttcgggagcgcctttgcgcacgaatccgccgccgatggaataccagacctgttcgtcgaccaagcttgcggcggcgtcgaaagcctggaatcgcatgccattggggtgcgcggccatgcgcttccattgttcgaacaccacgtcgcggtcgtagtcgaaatggatgcgtttgaggccggcgaggttcagagtatcgtccaacgcgcaggtctcgcggatgcgcatcatgtggtcggtatccacggtggccggcagattgccttcgagcccggccatcgcagcacgatcggtgccgtggccgagaccggtcagcgccagagaaccgtaaagcgtgattttgacacgtgcggtgcgatcgaccaaatggtcggccagcaacgaggaggcaaaggcatgtgccgcgaccatcgggcctacggtgtgcgaggatgaaggtccgacgccgatggtgaacatgtcaagcacactgaacatttggctccttctcccctgctggttcggcatgccgatgtcaccaggcgtcatgccatcacgatatcgtattccagcctagcgcccggaatctttcgctttgcgcgatgatggccgcgcgcgtcgtgccggcgagcgataagtcagtcagtgagatagtgcggagaacatcataaccagtacgatgataccgatgatggccaatacgatctgcaccaccatcagcccgatggtcagtcccttcttggtggcgattttgggcgcgtacgcctgtgccaacaggaaggcgatgaagccgaacaccgcgtagttgacggtcagggccatcacatcgctgttcgacaacaccacgccgttcagcggctggttcagcgtgttcatcatcgtgctcatcacgaacatgccccacacgccgtagccgattaatccgacgacgccgtacagccatggcttgagtttgtcgttggcacgcagggtcagggcttcggcacaccacaacagggcgaagccgacgatgtaggtgaacgccacggcgatcagtatcacgatagtcgcccacggcaggagtgcggccacattgccgatcatggacagatagaatcccgagcaggcgatggcaccaacggtgagtgcagtgcccgcaatgacggcttgggcaagcatggtgggcagggcgccttgttcgactcgttcgacatcggtccagcgtgaagccatgtggattcctcgtttcatcaggtacatcgtcacaacgccacatagcctaacggccttttgtttcggccttataagctctccacatagtaagctgcgagcccctctgacgaggggagctgtcggcgaagccaactgggggagagaccgcggcacagccgcaaaaaacggcatcggccacaggccgatttcaaggtgcctccggtgggactcgaacccacaagccgaagcgatcgattttaagtcgactgcgtataccatttcgccacggaggccaacttttctattataagctatctcctgccctgagcattgcttgcgggttgctgcgcttcgtgcagccgtcgcggcatagccgctcccttcgcctacaaacagcccagtgggctgtttgtagcagccggtagcgatagcgtcgccggcgtcgcatataacgcaaacagcccaccgggctgtttgcttaacggctcagcccgctggaggcacttaccacttacgctattgagccagcaaccggcgaccataatcgagcacaatgccgtccagcagcccgtgttcgctggcgacgaacgaatcgatggcttcaccatgatcggccttggcggcttcgctgacacgcgccagcacacggctccagaccacagcgccgccgccgaccacatcgatacggccggggtggatggtcttgtattcgcggcgctcggcgcgcgtcatcctaaggaacttgtcgtccacggcataggcgtcttcaaggctcaaccgatgcccgtcgaccacggtgtgatcgtattctttcaatcccatagccaaggcggtcatcgtggtcaccgtgccggacacaccgatgatggtacgggccttgcctgcgtccacggtgcggaaggcctcatcgatatgctcgtcgatgtccgcaacggcctcatcgatctgcgcctgggtcggcggatcgttggtcagatgacgttcggtcatgcgcacggaaccgatgttcgtggagaatgcaccctgaacctgggtggtgggcgcactgacgccgtcgccaccgatgaccagctcggtggacccgccgccgaggtcaaccaccagatagggagcgggcaggtcatcgcgattgaccacggaagtggcgccgaggaagctcaggtcggcttcttcagtgccgggaatggcttcggggcgcacgccgaggatacgttcgatctcatcttcgaattcctcgcggttttccgcgtcacgagtggcggaggtggcaacgaaacgcaggccgtcgatgggatgctcggcaatcacaccggcgaattcccgagcagccgcataggcgcgttccaacgcttcgtcggcaaaacgatgggtcttgtccacatcctgaccaaggcggatcacacgcaggatgcgcggcaccacctcatgcatgccatcggcatcgacacgtgcgattttcagtcgaatggagttcgtgccgcaatcaatgccggcgacggttacggattccttgctcattgccttctcctcgtatcccttagtgcgtatgaatgggctgttcgcggtggctcatctgttgatcaatcgtccagtgtgcagcggcagacggtcggatcgaattcgtctttgacgcgttccagcaccaaatcgccaatggggttgacgcccggccccataaccaaggactgggccagcagggcatgcaggcacttgacgcgcaccggcatgccaccggccgaagtgccttcaatatgctcctcactgtcgccaagacggcctgccagttcgtgacggaatgccagatacaggttatgggcctgctcatatgcggccttgagctcctcgtccgaggccaacatgtcgttgtattgctgcatcacgccggcggcctcgacgtgggaggcggccttgacggcttccggaccggtcagatagcacgtggtggggaaagggattccgccgggcaacaccggacgggtgattacggcaagtggcctaccgcagacgcatcgcgcccccacggcgaccatgccgcgcgggtatcggccgagctgacgctgcacctggtcgatgtcatggtcgttggcgggctcggcaagcatggtgtcgacaagggccttggccttggcggcgatatcgatggtcactgttgggttccctcccctgtgttctgctgggtgttctgatcggatggggtgttctggtctgacttatcggactgcttggatgagtcgttggatgacgagtcagaggaaccggaagtatcggatttgccggactcgctatcggtcacaggctcatcggcctttttgagcgagtaagacagttcgctgtaccatggcaggacttttttgttgctggtattggaatcttccgttttctgggattcgcgatcggagccggtcacggcttcgggatgcagcacacgcacggcctgttcgccggggaatacgaagccgaggcgttcacgggcctgggcggtgatgtaggccttgtcatcccaacgcttgatatcgttctccaactcctgcttttgggcgatcagcgaggcttcctcacgcttgaggccattgagctcggccaggttcagggcataagtgtggaaggtggagaccagctggatggtgccgagtgcgatgatgaacagggagacgaagaacgctatgggccccgccgacccttttttcctgacttgtgctttgccggttttgccaggtttgccggtacgggacgacttgctcatgtcacatgaaaatacccgccgcattcgacttgacgaacacgacgggtatcgagcttcagtggaaactcacgcctttacgggcgtttcagctcacttggccaagtacttcttgcaggccttgaaggcgctgtagccggcgtactgagcggtggagccgagctcctcctcgatctcgagcaggcggttgtacttggcaacgcgctcgccacgggccggggcaccggtcttgatctggcgggtgttcttagcaacagccaggtcggagatggtggtgtccggggtctcgccggagcggtgggaaaccatggaggtgtagccgttggcggtggccagctcgatggcgtcgagggtctcggtgacggaaccgatctggttcagcttgaccagcagggagttggcggcgccgaggtcgatggccttctgcagacgagccgggttggtgaccagcaggtcgtcgccgacgaactgcagacgatcgccgaggcgagcggtgatggcagcccagtcttcccagccttcctcattgaacgggtcctcgatggagacgatcgggtactcgttgatgaggttctcgtagtagtcgagcatgtaggcggagtcgcgctcttcaccgtcgaagcggtacttgccggtctccttgttgtagaactcggaggaggcgacatccaggcagatgccgatctgcttgccaggctcgtagccggcggcggagatggcgtccatgatgtacttgagggagtcctcgttggacttcatcttcggggcgaagccaccctcgtcgccgaggccggtgttcaggccttccttcttcagaacgttcttcagggtgtggtaaacctcaacgccagcgcgcagagcctcggagtaggtgtcgaagccgtacggggagatcatgtactcctgaatgtcggtggcgaagtcagcgtgagcgccaccgttcatgatgttcatgttcgggaccggcaggatgtgaccgttggtgccgccgatgtagcggtacagcggcaggccggcggactcggcggaagcgtacagagcagccagggagacacccaggatggcgttggcgcccagcttgcccttgttcggggtgccgtcgagctcgatcatcaggtcgtccagagcgcgctggtcagcagcgtccatgccgatgaccttcggagcgatgacctcgttcacggccttgaccgcgttaagaacgcccttgccgccgtagacggacttgtcgccatcgcgacgctcccaagcctcagcttcaccggtggaggcgccggacggaaccagacccttgccctgagcgccgtcttcggtctccaggtagacctcaacggtcgggttgccacgggaatccagaatctgacgcgcgtacacgctttcaattactgccacaactactccttaaaacggttgtgtatcttgaatgacattcttaagaatagtgcgatttgtggacgttgtgaacaacacgcccaaaatctagtgttagcgctcacaatgccgatgcgccgcctgattgcaaggcagtacggacgaaatcgctcagtcgacgtccttgccattgaggtagtcgatttcactgtcggacaatttcagttcgctggctttgaacgagtcctgaatctcctgcgggtttctggccgagggaatcgtgaacagatattggtattgcgcaagttcccacgcgagcgtgacgcgctggtaggagcagtcgtgggacttcgcgacttcgcggaaccgatcgaacagatgctcgttgaacgggtcaaggaatccaccgagcggcgaccagcagacgaaagccaaaccgagtttttcgcaggtctccaacgtgtgttcggggtcgcggtgaaccggggagaactggttctggacggccacgagacgatcgcccaaaatgttgtgggcggcttcgatgtccgcgttgtcgattctggagatgccgacagctttggccacaccttcgtccacgagctgcttgagtgcgcccatctggtcttcgtacggcacctgcggatcattgcagtgcgagtagagcagatcgagcgtatcgacaccgaggcggcgggctgattccttggcattggcgatcatggtttcaggtcgggcgtcggcctgccagccgtagttgccgttgccgtcaagcgtgcgcagccagccggttttggtggctacgagcacctgatctttggggccatgccacgagtgcagagcatcgcggaccagatattcgccatagcccatatcctccggttcgccggtgccgggtgcgctgggcagataataggaccaagccgtgtccaaataacggactccggcatcgagcgcggcatggatggtctcgattgcctgatcacggttggaggggcgcccctcgatggcgagcgccatcgtgcccatgccaaggcggggaatctcatagccggcaagtgttgccgtggtcgcgctctggttcgtgcggctcgtagtcgtttcgctcatagcagtcacttaatctcgctcgctggacagtcggaacgattccgtctggggtgaatcatcgtcacaaacgacggcatgaatatgaatatggctcaccggaggttgcccggtgagccatagctggctcgactgtcgcctcgcaccccgtctacaaacggctctgccgtttgcttgacgacggggtccatgccaaatcatcaagtaactggttggtccagaggactacctggtcggagctcatgggaccttggcccagggagccggtgaacggggtggggacgatgagttggtgggtgaccgggcggtattgggtgcctttgtaaatacggcccatacgcatctggatggattcgggcgggtcgatgcgaccgatgcgcacgcggttggattgcgcgagaatctccgaaatgccgagcttgcgggccttgaacttcagacgggccacgtcgaacagggtctcgaattcgaccggcggcttgccgtaacggtcggtaagttcctcttccaaatccttcagatcggcctcgttgcgggcggaggcgagcttgcggtacgcttccagacgcagcttgtccgaatcaatgtactcgatcggaatcgacgcttcgatgggcaggtcgatggacacggccaccggctcgacgttctcttcgggctccttgtacttttccacggcttcggacaccatgcgtacgtacaggtcgaagcccacgccctcgatatggccggactgctcgtcgcccagaaggttaccggtgccgcgcaattccaagtccttcatggccacgtcgaaaccggagccgagcgccgtgttctgcgcgatggtggcgagccggtcatgggactgctcggtcatcggcttggacgggtcgtacaagaagtaggcgtacgcgcgctcgcggccgcgaccgacgcggccacgcagctgatggagctggctcaagccgaaacggtcggcatggtcgacgatcagcgtgttcgcattggagatatcaagaccggtctcgatgattgtggtacacacgagcacgtcgatgtcgcgatgccagaagtcgcggatgatctggtcgagctgcttctcccccatcttgccgtgggcgatgccgacgtgcgcctcgggcaccagcgtgtggatcttgtcggcgatggacgagatgtcttgcacacgattgtggacatagaacacctggccgcctcgcagcagttcgcggcgtacggctgcggtgacctgcgcatcctcgtaggcgcccacataggtcagcaccggcaaccggtcttcgggcggggtggcgagcgtggacatctcgcgaatgccggtcacggccatttccagcgtgcgcgggataggcgtggcagacagggacagcacgtccacgttggtgcgcagggctttcagcgtctccttgtgttccacgccgaaacgctgctcctcatcgatgatgacgagtcccagatccttgaacttgattttcgggttcagcagcttgtgcgtgccgatgaccacgtccaccgtgccggtttccagcccctcgatggtctcgttgatctctttggtggtctggaatcggctcatggccgccacattgaccgggaaaccctcgaatcgttcgctgaacgtctcgtaatgctgctggacaagcagcgtggtgggcacgagcacggccacctgcttgccgtcctgcacggccttgaaggcggcacgcagtgcgatttcggttttgccgaagcccacgtcgccgcagatgaggcggtccatcggcacgggcttctccatgtcggatttaacttcgtcgatggtggtgagctggtcggcggtctcctgataggggaaggcgtcttccagctctttctgccatggggtgtccgggctgaacgcgaagcccttggcgcgctggcgggcggagtacagcttgatcaggtcgtcggcgatctcgtggacgtgtttgcgggccttggccttggtggccgcccagtcggagccgccgagcttgttgagcttgggggcttcggcaccgatgtatttgctgacctggtcgagctggtcggtggggatgaacagtttgtccgccggggcgccgcgcttggaaggcgcatattcgatgaccaggtattcgcgagtggttttgttggcgccggtgccgatggtgcgctggcgcatttcgatgaaccggccaatgccgtgctgctcgtgcaccacgtaatcgccttttttgagttccaccaagtcgatggccttgcgccggcgtttcggcgttttggccacggccacggccgaagtgcggccggtcaggtcgcgttcggtgagcagggcgattttggcggctttgtccacgaagccgtcgatggcctgagagcggatgacgtcgaaattggcgatgccggtagtgttgatcgcgcgcttgagtctggccaaggtgccggccgcagcggcggtgatggtgacgtggaagccggcgtcgagcaggccttcgatgccttgggaggccttggcctcatcccctcggaattcggccgggttctgggcgtcgagctgcacgtggccggtcagcgtggtgtccacgccgaaactggtgaggcgaatcaccggatgttcggagtattcgagggagctgatggtttccgcatagtcgaggaagctggcttcgtcgaagctgatgggcgcgccggagccgtggccggaggcggccacatgccagctggcggccaggaactcgttcgcggtttttgccaagtcttcggcggaacggcgcagtttctccgggtcgctcaggaggatcacggcgtgcttgggcagcatggagcccaccggttccagatggtccacgagtgcgggcatcagggattccatgccttcgaccggaatggcgttggcgatggattcgagcatgtcctcagcattgggaatcgaaccgaccaaggctttggcgcgggcgcgtacggcgtcggtcagttgcagttcacggcatgcggtggcccagatggtcttgaggccgtcgccgtaggtacgctggtcggaggcgtggaattccttgatggtgtcaatttcgtcgccgaagaattcgatacgcaccgggtgcggtgcggtgggcgggaatacgtcgaggatgcctccgcgcaccgcgaactcaccacggtccatgaccagatccacgcgcgtgtaggcgttttcgatcagacgtttggcggcttcgtcgaggggcaggtcctcccccacggtgaacacgagcggctcgacgtcgcccagtccttggacgaccggctggatgagcgagcggatcggcatgacgagaatgcgaatcgggccgaacatcggatcggtatcgctcggatgcttgagtctgcggaacacggccatgcggctggccacggtgtccgcgcgcgggctcagacgctcgtgcggcagggtttcccaggcttcgagctgggcgatgtcgttcgggtcgccgtcataccaggagcgcagcgagcccacggtctcttcggcttcgcggccggaggccacgaccagcacgaccggcttgccgggtttgccggtcacaccctggcctatggcggcggccaaagccgggcgcaagccttcggggatgccggccaggacggagttgtcgacgtcgtccgaaacctcgatgtcaccagtggcgagcctaaggaaggtcttgtcctgttccagcccggacaggatgcctaccagtgagccgttgatcaggtccgggtgcgtcgcctcaccggccattgaacttctcctgggtcttggcaagaccgtggaagatgatgtcctcggcggcgtcggcgccgtcagccaggaattcgggcagctgcttgcgctggtccgggccgaagccgcccagtacccagttcaccgtgttgtcatgcgcgttcgcaccgcgcttggagtggccgacgcccatgcgcacgcgcgcgtatttcggcgtgccaagggaacggtcaatcgacttgatgccgttgtggccgcctgcggagccgcctgccttgaccttgatacgaccgaattccaagtccatgtcatcgtgaatcaccacgatatggtcgggctcgatctggtaataggcgctaatggaagccaccgcattgccggaatcattcatataagtcagcggcttggccagaaagaacttgacggtgcggccgtccaggttcatcacgcttttaccgagcatggccagacctttgtggtcggcgaagttcaccgtccaacgttcggcgagcacgtcggcggtcatgaagcccatgttgtgccgcgtgtcctcatattttttgccggggttgcccagtcccgcaatcagccagaaatccgatgccataatccactcctcgtccgtcttcctatattcccgtatgcacgttctgtacgttccgtacgtcatgcgcgcgttcgcctcgcgcactggcccatgcccggccggattcaaccgtcaagattgtactcaacgccgccgtcaagccttggaatcggcaagcagcagggcacggcattgctcggcatccatcgatcggaccgatgaatggtgaaacgcttcgacgtcacgagtcacgatgacgtcggcgtcattgtcctcggcaacggcacggatgagcccgtcctcgaagtcgggctcatcggaccggtacgacatgcacgcatggcgttccataagtggacggatgtcgaacaattccatcagtccaccgatatcgtctcgcgccgcccgctcctcgccataatgcttgcgcaacacgcaatacacgtcattcaatgacgataccggcgccatgatctcaatgtttggctgtgcaacggcttccatgagcaaatcaacacattgtttatggaaaggcgctcgtttgtcattgcacaaatcgagcagaatattcgtgtcaaacagcagtttcatcccgtcccccaaatcgttccatacgtgcctgcgcgagaatctcctcatccgaaagatcgccttccgcctccggcaaattccggtcggcgaaacgttgaatcaactcctgctttttcctacgctcccgctcctgaatcagggagagcgtcagacgctcgaattccggcagttcccccgtatccgcaaggtagtcggtcagatcacgaatcaggtccgaataggtgcgcccattacgcttaagcactttctccgcgtcgcgcttccgttcggcattgacgcgcgccgtcaccatggccatagtcatatcgcacctccttgtaataccagtattacaagagatggggacgagtgaatcgcgtctattaggcggtgccgccagcgaccttttcgcgctgtttgccgttgaggtaccagtaggccagcgccacgaacagggccgccgaggatattgccgagcgtggctgcggacaggttatagaggatgcccgacacgtcgagcgccgcgacgcccgccgcgtcggcgccgaaaccaaacgttttggcgaccaggcccatcggcaggaagaacatgttggccacgcagtgttcgaagcccatcgccacgaatccggcgatcggcagcaggatgcccagcaccttgtcggatacggagcgcgcggcgaatccgatgcgcacggccaggcagacgagcacgttgcacaggatgccgcacacgaacagcgtgtcccagcttggcgtcactttaacatcaactccggttggaaaaaatctcagtatgtagcattcggttctcaaataggagaaacatgcagcggcaatcaacaacttgtcgtttacgacgccaagcaagggaaacagctcagacagatgacgcttccctgcaatcggatgacatattgcgggacggcagcggattttgggcgttcttggcgtggcatcccgcaagcgttatcgcacgttatctgcaccgaatcataagaatggcagaattccaatgatttcgcaggaagagttgcgggacgcgagctatgtgcatcgtttgacgtgtgtggcatcccacgtgattgcgggatgccacgtcaaaacggacgaaaatcgcgtgccgtcccgcagtttgccgttatctgggataagcgcgtccgatatatggcgttcgaggaaaagagctgatccgatacaactttttagtgttataggacaccggaatccatggagagcaagggtaaaccgcctcgggcctacaggtccaaataccagtaggacatgtcccgcatggtgccggtggagtcggtggcagcggcgggcatgaggccgaattgggtgaagccgaagcggcgcatgagggcaatggagccgacgttatcggcgaaaatgatgccacaggccttgcgcatgtggcgggcccgcgcctcggtgagcagcctgtcaagcatgaacgtgcccactcccctgccttgccatgccggatcgatgtaataggccaaatcggtgacgccgtcatacccggcacgatcgtagaacacggagagcgcaccgaagccgatgattgaaccgtcttccgattccacaacaaaaacgccgtagggcggcgtatgggattcgacccaggcgcggcgttggtcgagggtgcgcggggtgaggtcggcggtggccccacccgccaccaccgcagcgttgtagatgtcggtgatggcttggatgtcggattcgacggccggatggaaggtgtatggcatgaagttcctttgaatacgcaaatagcccgtccttatgataaggacgggctatgtcagttgaggtaaccgactcccttcagtcgccttcggcgatagctcccctcaccctgagggaagccaagttacttgtcgagctcgatggccttgttgagggcgtcttcaagctcctgctgcgccttgccgtaggcggtccagtcgccgttcttcatggcggactggctgtccttcatggcttgggcggcatcgttcaacgcctgctggagttcggggctgcggtcggaagacgagccggaatccgactttccgtccgtggtgccggactgaccaccattggtatcggaaccagattggtcaccggacacgttctcggcatcgcccgcggccgcaccggaattgccaccgaacacctgatccaaggcctcatccaacgtatccgcgaatccaacctgatcaccgaatgcgaccagcgtcttcttgagcaacgggaatgaggtcacgcccgaagacttgacgtacacgggctgcacgtacaccagtccgccaccgagcggcagggtgagcaggttgccgcgcaccacttgcgtgtcgccggattgcagcaggttcagttccttggatacatcggcgttggcgttgaagttgttctgcgcctggccggggcccggtacgttcgaatccttgggcagctcctgcaatcggatggtgccgtagttcgagcctatcttgcccttctcattgccggcatccgagtcgaccgacaggaagccggtcaggatctcacgggtggactggccagccggaatgtaggtggaggtcagagagaacaccggttcctcggtgccaccggtctgcaaggtcaggtagtacggcggctgcaggatgtcctggtcctgctgggactgggattcggtcggatcgaccggcgtctgccagaagtcttcgcctgagtagtactggctggcagaggtcacgtggtacttggagagcagctcgcgctgtaccttgaacaggctttccgggtagcgcatgtggctcatcaggtcgccggagatatcggagagctggtggtactggccagggaagatcttctcccatgccttgatcaccggatcggattgatcccacacgtacaggtccacggaaccgtcgtaggcgtccacggtggccttgaccgagttgcggatgtagttggccttctgagagcccagggacgagaccgttgcggaagagacggtggtggaatccttggtggcggagccgaggtcggtcatttgcgagtacgggtaggcgtcggaggtggtgtagccgtcgacgatccacttgacgcgaccatcgaccacggccggatacacgcggccgtcaagcgtcaggtacggtgccaccttggccacgcgctccttgggggaacgatcgtagagaatctgcgattcgctggtcacacggtcggagaagagaatctgatcggagccgaagcggatcgcgtagagaatcctggagaacaggttgccgaccgaagggccgccgtcgcccttgaacgtggtcagagcaccttccgaaccggtcgggtagtcgaactcccaagcctgcgtgccttcaggggcaccgacaatcgagtattcggtggtgttcggcgagaagtagatgcgaggctcgtacttttcggattcggtgagcttgccctgggtggggatgccggattcgaagaattcgggctggccgtcggcggtcaccttgttgccgtaggcggccaccacgccgtaaccgtgggtgtacacggtgtggtcattgacccagttgcggttgtcattgccggccagatcgagctcgcgggcggcaatcacggtgtcctgggagacgccgtcaatctcgtacttgtcgaccgccagggtgtcggcgaaggtgtagtactgcttggactgctgcaactgtttgaacgtggggctgacgacctgcgggtcgagcagacggatctgcgcggtggtgtcggcctccttggccagagcgccctgctcacccttgtcggtcaccttgtattgctcggtcttgagcttgtcaagaccgtaggcggcgcgggtggcgtcgatgttgcgctggatgtaggtggattccatctcctgtgcgttcgggttgacgcggaagcgttgcaacagcaccggccatgccacggtgagcacaagacccaccacgaccacgacggcaatggaggtcaccggcacacgccaggccttgagcgcggcggaagcgcgcacgccgatggacgtctggccttcgagcgtgtgggagcgcatgagccagatgcccagcaccacgccgaggatggcggtcagcacggccatgatgaaggtgacggggatgttggcatgtacggcggtgtaggaggcaccggtgatgcgtgaaccctgcacggtgagctggtcgaagacgccaatcatctggcgcactgcccaagcgaacatgttgagcatcaaccagatgccaagctggcgacggcaacgcttggtaatggagaacaggccgcgtccgttaaccggcatggtaatgcggataccgcccatcagcacatgcgtgaccacggaaaacacaaggcccacgcccagcagcatggccacggcggcgagcacgagcttcaggcccggcagcacgaacacgtagaagccgttgtccagaccgaactgcggatcggtggtgccgaacgactgcgcgttgaacatgagcagaatctcgctccagttcgcgttaaactgggaaccgaagatgacgccgacgatcagcgaaatcaccacggccacgcggcgagcggttttcgagctgacggatttgccgacctcgaccacatcgccgttaatgcgaatggtggaaccgtcggccgaatcagggcgtgctcgaatggccagccaggcggaaacgaagccggtcagggccatgagcagcgcgtaggccacccacagaccgattttcaccccgagctgggtccagaccacggactggaagccgagctggccgtaccacatcagatcggtgatgaatcgagacaggccgaagaacagaccgacgatgatggccaaggccagcaccacgccgatcagaatcttgctgccacggctggctcctgagccaccggacgctggcttacgggtgatacgcggattggccggaccacgtggagggcgggatgacccggaggggccagcgttggtgttgtgggccggaccgtccccatcggcctcgacatcgaggatgatcggatcgtcattgttcgcattgttgcgtcgtgaatcgccgccattgccgaacagtactgagaaaggatcgttaaaagacataactcaagcctatcgaaagggcgggaggtcggttatgccctgagcacagaatgaggcaacatcctgttctacgctctgttctacgcttgccggcatgaacagacaacggccacaacatatgcgtccctcagcacacgccacacgccaacttcggcacaggagcattccaatcgtggcggcaatatgtgctttggcggtggtgttggccggtgtggcagtctacggatggcatgtcggatggttcgccaaatccacatcaaacggcaacaccaccactccccagacctcccagacgagtgcgttaccgcgcaccgacgttccttccccgaagaagaacgacgatccggcggcacaagcccaacgtgcggtatccgccatgacgcttgaggaacgtgtgggacagttagtgatggtgccgttgttcgccggttccgaaccctcctcgttggcttcaacaatcgccgacgagcacattggctcggccattctcattggcaattggaataccggcgtcgatacggtcaagaccgcgaccgcgcaactccaaggatatgcgccggccggcaatcgtctcatcatcgccaccgatcaggagggtggtcaggtacagcatctgactggtaccggtttcgacacaatgcccagtgccgttgagcagggcacaatgtccgctgacgcattgcgtcaatcggcaggcacgtggggttcgcaattagccactgctggcataaatgtcgatttggcaccggtgcttggcacagtggttggcaatcgtgcctcaaatgctccgattggcgcgctggatcgtgatttcggattggatgcggccggcaacgccgaacatggcatcgccgttattgaaggtttgcgagacgctcaagtcggtgcggcggtcaaacattatcctgggttgggcgcggtaagcggcaataccgacttcaccaccgaaggcattctggatacgaccaccacgttggacggggccgaggcaggtgcctttgaccaggcgatcaccaaggccgatcctgcaatggtgatgatgtcgttagccacgtatcaatccatcgacccgaataatccggcggtgttttcttctacgattatcgacggtcatattcgcaacgtcctgaagtacacgggcgtggtgatttcggattcgatgtccgccgaagcgttgagcagctacgatgtaagccaattgggagtaaatcttgtcgaggcgggcggcgacatgtcctgcatcgggcagacggattatgtaaagccaattgtgaacggcctcaacgaacgggcgaagtccgatccggctttcgcttcgaaggtgacggcggcggcgactcgcgtaatgacattgaaaatcaagatgggactggcctgaccgttcatccttgcactggcgaggattgatgcgcgctgattcgcgctaatcctcaccagccctcgtacaaatgcacactagtcctcgtacgaatcgtcagtcctcgtacgaatacagaccatgcttgccgatgtattgcaccacgccgtcgggcaccagataccagaccggctcgtcgtgttcggcgcggcggcgtacatcggtcgaggagatggccaaggccgggatctcaagcgtatcgaccttgccttcgggcaaggtcacgccgtccgggctggagtagccggggcgcgtgacggccacgaagtgagcgaggtcccacatgaggtcggcgtccttccactgcatgatttcggccacggcgtctgcgccggtgatgaagaacagctcggcgtcgggatgttgggcgcggatatcgcgcagagtgtcgatggtgtaggtgacgcccggacggtcgatgtcgacacgcgagacggtgaatttggggttggatgcggtggcgatcacagtcatcagataccgatcctcggcgttggtgacgtgcttgtccagcttgaacacaggtcggccggtgggcacgaaaatcacctcatcgaggtcatacacccaggcgacttcagaggcggcgaccaagtggccgttgtggatcgggtcgaacgtgccgcccatgatgccgacgcgcaggcgtgtatgccagttgccgcgtgcggaaagcctgcctttgccgtggctgctggccccggccggtacggacaggtcggacatgcgccgttcggtttcgccttgggtgacggcaatgatttcggcgggctcggcggattccactgttttttcggactgaactgacgcagccgttttgtggctgccggtaacaccactcatgcctggccgccctcgccggcggcgtcatcggctgattcggtttcctcttcgatttcgccggcggagggattgtcttccttgggatcgatcttgcccatgtcttcatcccattcgtcttggaccacgcgacgaatctcggcgaaggtgggcagcgggaagtccggctggtagaggcggcggacctcggccacgcgctcggtgatgcggatgagcgtgtcggtcatgccgtcgaggtcgccgtcgtgctccatctggctgtatttgccgatgtagccttccatgagttccatgtgttcgcgcacgatcttgagctgggcatcgttgaggtccacgacttcgggtgaatcggtctcgggccagccgatgagcacggcgtccgcgtattcgagcgacgcacgctgggcggcggaggcgatgccgtcctcaatctgcacgaggaacacatagcggacgatgctgagccgttcggccgcgatcttcaggccgagcttgggatcgttgaggtcgatgtcgggccgcagttcgcttgccttgtttgccgtgtcagccgtagtgttcatgttgccgtcctcgttcatgcgcgcacctggcctgttccgtaaccgatccacttggtggtggtcatctcccgcaatcccatgggaccgcgtgcgtgcatcttctgcgtagaaatgccaagctcagcaccaaagccaaacacgccgccatcggtgaagcgagtggaggcgttgaccatgaccacggccgagtcgatgcgcttggcgaattcctcgatggccgcataatcctcggcgatgatggattcggtgtggcccgtggaatgcgtgttgatgtggtcgatggccgcgcccagatccggcaccaccttgatgcccatcttgagggccagatattcagtgtcccaatcctcctcggtggcgcggttgaggtcaaggccctcgatcgccgcgccggagatgatgtcatacgacgtggtgtcggcctgcagtacaacgttcgcctcggccagagcggcggcgatctgcggcaggaattcggcggcgacatccttatgaaccaatagcttctcggcggcattgcacacacccacgcgctgggttttggcgttgatgatgatcgggatggccttggcgagatcaccggacttgtcgatgtagatatgcacgttgccggcaccggtttcgatgaccggcactttggagttgcgcacgacggcttggatcagacccgctcctcctcgcggcacgagcacgtcgatatggcctcgcgcctccatcatggcggtggctccggcgcgtccgtactggtcgacggattgcaccagtgcggattcgaaaccgtgtgcttcaagcaccggggcgatgacgcccagcgtggcagcattggtgcgttcggcggcgtgaccgcctcgcagcaacgcggcattgccagatttaaggcacaggctggccacgtccacagtgacgttcggccgggcctcataaatcatgccgatgacgcccatcggtacgcgcgtctgggtaaggcgcagaccgttgggcagattgtatccgcgcacgatttcgccgaccggatcaggcaaggtggccacatgacgcacgccttgggcggcggcggccacgcgcggcacgtcgaacagcaggcggtcaagcttgcccgcatccatgccgttttccttggattcgagcatgtccagcgcgttggcggcttcgatgtccgcggcgtgctcgtccagcgcgtccgcaatggcgagcagcagttcgtttttggcttcggtatttgcctgtgcaagacgctcctgtgcgcgtgcggcctgatcggcctggcggcacaccgcgtcgaacacctcaggactcaattcatcgctcataaaaaacaagagtaacccacaatgggccgcattgcccgtttcgacccatattgcaccgaagatagccggggatataagcgcggctccctctgatgagggagccgcgtacatccgcaaaaatcagtgaatctggtccaggtcggggtagagcgggaagtcttcggcgagcttgtcgacgcgggccttcagcgcggtcacgtcggcggacgggccggcggcgagcgcggtgccgatgatgtcggccacctcctcgtattccttcggtccaaagccgcgggtggccaaggcggacgtgccgattctcaggcccgaggccaccgaggccgggcgcgggtcgaagggcacagtgttgcggttgatggtgatgccgcaggcggcgagcagatcctcgccctgctggccgtccatctcgctgttgcgcaggtcgaccatcaccagatgcacatcggtgccgccggtcagcacggagatgccgctggccttgacgtcgtcggccagtagtcgttcggcaaggatcttggcaccgtcgagcgtgcgctggcggatgatctccgggtcggtgcggaaggtctcggggttcacgccgtacgcctcggcgtggtagaaacggccggggtagccttcggcgtatttgttggtcagcacggatccctggcattgcagtaccgctcgcggcacgaagttctcagaggcgatcatctcaaggccactgcgctggcggcccagttcggagtccagcagttcggcgatctcaggatcggtttcgcagatcggcgcgttgaaagcatcggttgccttctgcgcaaggggtgaagcggtcatgggtgctctttggtataagcgacaattgattcgccgttgtcgccttaccgtatggcccgtttgcagccggcctgtttcatgatatggccggtccccgttcgatggcaatggtgattttcgccggtgcgaccggtcggttatgcgagacggacggcccttctgcccacggcccacgctagactgatgtggattcatcatccctttcaggcagaaggattcatcgtgacaaccaccttccattccacccgtagcaccaccgattcgctgaccgccaagcaggcgattcgtaagggcatcgccgatgacggcggcctgttcgtttcggacgcgttgggcaagaccaaggtggacgtggcctccctgccgggcaagtcgtaccagcaaatcgccgccgaggtgctgggcgcgctgctgccggacttcacggccgaggagctgggccagtgcatcgccgacgcctacggcgaacagtggtccgacgagcgcatcaccccgctcaagcccctgggcgacgattacgtgctcgaactgttcaacggcccgacttccgcgttcaaggacgtggcgctgcagatcctgccgcgcttcatggcgcacaccacgccggccgatggcgacgcggacgagaagatcatgatcctcaccgccacctccggcgacaccggcaaggccgcgctggccggcttcgcggacgccccgggcaccgcgatcaccgtcttctacccggaaggcaaggtctcccaggtccaggagctgcagatgaccacgcaagccggctccaacgtgcaggtggccgccgtggaaggcaacttcgacgacgcccagtccgcggtcaagcgcatcttcggcgaccgcgccctggccgagcgtctcgccggcaattcgcacgtggtgctttcctccgccaactccatcaacgtgggccgtctggtgccgcaggtcgtctactacttctccgcttacgcccaactgctcgccgaccaggtgatcaacgtcggcgatgaggtcgagtttgtggtcccgaccggcaacttcggcgatatcctcgccggctactatgccaagctgctcggtctgccggtcaagcacctcgtggtggcttccgacaagaacaacgtgctgttcgacttcctgaccaccggtacctacaaccgccagcgcccgttcttccagaccatctccccctcgatggacatcctcatctcctccaacctggagcgcatgctgtactacttgtccgagggcgacacccgtctaatctccatgctgatgaacgacctcaacaagtggggcacgtacgagatcccggaagaactgctggccaagattcgtcagatcttcggcaccggttgggccgatgaggatcaggtacgcgagtccatcaagcactgttgggacgagaaccactacgtgatcgacccgcacaccgcctgcggctactacctgcttgagcagatgccgcgcgacccgctgaccccgcgcgtgctgctctccaccgccagcccctacaagttcccgcgcgtggtgaacgaggcattgggcttcgacgccaccggcaccgacttcgagtgcatggatgtgctggcccacgagaccggcaccaccgccccggccgccctgcgtggtcttgagaccgccgacgtgcggttcaaggacgtcgtggccatcgacggcatggaggactacgtggagaaggccgcccaggcgctgtgatagtccgctgacggcactaactgacaattcccaaccgatacatgctttaccagcatgtatcggttttttgttttctgatgtcacaagtcgaaggtccaggcatgttcaagcatgtccgagccttgtcacgcgcggctttcttgcggcttttcacctgcaacgagccaatggcgtgttgcttgttttttctaggaaggcgggaatcgccatgctgccggcgaacgggaaaatccatgtggtttgttaggttctgtttctgcaactgaatagtcccatgagggagtagacagcattgcggcgaaaggctcggcccaaaccgcaatgtggcaagtcaacatcgtggccgtcggcagttccgttacggtctggctttgccttaaatgacgagactcatgtaccgcggagtatgcgatacatggtcgtcaacgattcgtttggctgcgtgccgccatgttgcgcggtacgcgagtgatattacgcgggtttcagtgcggtgtgtcaaccaaacgagaggaacatatgaccacggccaacgggcagacgcccgcaccattcatgcagaatgcgccagcagtcatcagcacgctgggcaccgatgcacatcaaggcctgaccagcgaacaggccgcgcacaacctgaaccagtacggccccaacgccttcaccaagccgaagccggaatcgatgctttcccgcatcgtcaagacggccgccgacccgatgctcatcatgcttatgatcgcggcggccatcaccctgggcgtcaacatcacccgcgccatggccggcggccacgccgacattctcgaatgcgtgggcatcttcttcgccatcgccctgtccgtgaccatcaccgtggtgatggagggtcgcagcgccaaggcattcgaagcgctgaacgacatcaatgacgacacgaccgtcaccgtggtgcgcgacggcgaggtcacgctggtgtcgcagcgagacatcaccatcggcgatgtgctgcagatcagcaccggcgacaagctgccggccgatgcgcgcctcatcgaatcgaacgatctgaccgccgacgaatccgcgctcaccggcgaaagcgtgccgagtgccaaagccgccgacgccgtgttcaccgacccgaagaccccggtggccgaccgcacgaacatgctgtattccggctgcttcgtgaccgccggcaatggccgtgccgtggtcaccgccgtgggcgacgacaccgagttcggcaagatcgcccgcgaactgcgcgccgccaacaccggtatgacgccgctgcaggagaagctcgcgaagctcggcaaggtgatcgccgtggtgggctcgattgtggccgcactggtgttcgtgcttcaggtggcccggttcgtggcttccggcaccgcctcgttcgacacgatttccgaggcgttcatcacctccataacgctgatcgtggccgccgtgcccgaaggcctgccgaccatcgtggccgcgtgcctcgcggtgaacatcatcaaaatgtccaagcagaacgcgctggtcaagaagatggtggcgtgcgagaccatcggctgcatcaacgtgatctgctcggacaaaaccggcacgttgacccagaaccgcatgaccgtgatcgaggcgtacaacgcgccgggccgcgccttggagaagcccgagcagatcaggaaccgcatgctgctggagaacttctgcgtcaacggcaccgccgacgtgaccttcccgggcgccaccgaagccgaggccggcgcgatgccggaattcatcggcaaccccaccgaatgcgcactgttggtcgccgcgcacaaggccggactcgactaccggattcgccgcgagcgcgcgacggtgctccacacgtatccgttctcgtcggagaccaagagcatgaccactgtggtgcgtgacggcgacggcattaccgtgttcgccaaaggcagcccggagaagatgctcgacctgtgcgccgtcgacgccaagacgcgcggcgaaatcgaacgggagatcgcgaagttccaggcgcagtcctgccgagtgctcggcttcgcccaccgccatatttccgataaggacgccgacactgcggctctcgattacgctgccgaccgcgccggcttggaatccggcatgatgttcgacggcttcgtggccatcgtggatcccctgcgcgaggatgtgcccggtgccgtggagcgctgccgcaaggcgggcatcgagctcaagatgctcaccggcgacaacatcgtgaccgccacggccatcgccaacgaactcggcattctggacgagcggcatatcgccgtcgaggcgcgccagatcgaggaaatgagcgacgaggaactgtcccgcgaaatcggccgcatccgcgtgatcgcccgcagcacgccggttatcaagatgcgcgtggtgaacgctctgaaagcccagggcaatgtggtggcggtgaccggcgacggcatcaacgacgcgcccgccatcaagaacgcggacgtgggcatcgccatgggcatcgccggcaccgaggtgtccaaggaagccagcgatatcgtgatgctggacgattcctttgccaccattgtcaaggccgtgcactggggccgtggcatttacgagaatttccagcgattcatccagttccagctcaccgtgaacctgtcttcggtggtcgtggtactcgcctcgctgttcagtggtctggccgcgccgttcaccgcattgcagctgctgtgggtcaacatcatcatggatggcccgcccgcgctgacgctcggtatggagccgattcgcgacaatcttatggaccgcaggcccacccgccgcgacgccggcatcgtctcgcgcggcatgctggagcgcatcatcgtctccggcgcgttcatcgccgtggtgttcatggcgcaaagctggacgaacttcatgggcggcaccgccgaacagcagtcgaccattctgttcacgctgttcgtggtattccagctgttcaacgccttcaacagccgcgagctgggcaacgccagcctgttcgccaatctgctgcgcaataaggtgatgatcggcgtgttcgcgctgatgttcgcacttcaggtgctagtggtgcaattcggcggcgcgatgttccgcaccgtgccgctgccgatcgacatgtggctgaaaatcatcgcggtcggtttcggcgtggtggtgctgcaggaagttatcaagaccgtcaagcgcgcagccgccgccatccgcgcgcgccgcacggccaatgaaagcgattcccagcaaccgcaccagccaatcgctctggatctggtggactgataacacaccgataacggaaagagaccgacagattcctgtcggtctcttttcattcgcggtcggacagatgcgcggctagagttctttggctcggtagatgcggatggctataagcatggagccaaaatatgcgagcagacacagcacggcgagaacaagcgccgtatgccaccagatcgtcaggaaatcggtaatattcagcaaaagccattgccagtcaacaggcaatcgggacagcagcgcaatgacggcatacaagccaaccaggaccacgccagaggccaccatcatcttgcggaaggtgaaccggtatgcacaggccagcagcaccgacccaagaatgacagccaaagcgaagatgaaagcacctgctgccaaggtaccgatccaccccatatctgctatatcgccaaagacaatgaagacgccgccgcatatcaccacgtccaaagcccagagcaggccaaccaccaacagaaaaaggtaccgacctacaacttgtgcagtgcgtgaaacaggaatcagccctcgcatggcactgtgccctgcagattcctcggatgacgcaggccccaatgcactcatacatgccatcgccgatgccaaacctccgagtccgcccatcagaccactggcaacgtgttcatcgacgtgggtcgatatcatcaccagcgatatcacgatagacagcaccgggaaaaccagcagaaataccatattcgccacgctaaacagacccgtcccgacacaatcgaatcgacattgctttactacggatttccagctcatcgtcaccattcccttgaagcaaatatgcgagaggcaattacatacgagactccatatgccacaaccgtcgttgccaataccgcaataaccagccacaatcgttgcgcgatgatggcattcgcggcatgggccaatcctttggtcaccgaaacaggcaaaatagatagcagtatgaatccagccaatacaacgacataaatcaccatcatcgtgacttgaagaccgcctagtttggtccacagataacccgtgggcacgataagcgcgaccatcagcgcggtgcagaaacctcccaacggagccgcccacagattgcccgcaaatgaccaatctggattgaccagcacttgcaacccgtcaatcagcacgatcatcgctatcgacaatacggaaatcaccaatccaaccacatatcgcgcggccacctgactcttcctcgaagccggaataatgccacgaagtcgatatccgttctgtaagtcagcaaccgccatggtcagcacccacatggcacaggtgaataccgtcatgatgacacccatgcgatagccgaagccatcaccataaacttcaccttgaaagatgacggagaacaacggtgccaacaacaacgagaacacagtccgttcgccgacgcacaggtaggccatatcgacgcgcaatgcagtggccaatgcatgttgccgagaccgcgacaccctcagtattgcccccatggccgctcacctcccactcaagtcacgattggaatcatgggcattggtcagtcgaatgatgtcatcaatggaagccgattcaacgacaagccccgaaaccaccgacgcaacagcatcaagcctgtctgaccggaccagcgcatcgaatccggtggcatacgtatgtgagcccagcaccacgtccgcaggcagttgtgccagttcgtctggaccgcccttaatcaggcggaacgattcctcaaactcgtctttcggaccggtgtagtagagacggccatcggtgatgtaggtaatgaagtcagcagcacgttcgaggtcggcagtgatatgggtgctgaacagtaccgaatgttcgccatcctcaatgtaggcatgcaggatatccatgagttcgtcgcgggcaagcacatcgagtccgctggtcggctcgtcgagaatcagcagcttggcatcatgactcaatgcgatggccagcatcagcttcatctgcatgccgcgggaaagatccttgatatgtttcttgccgttctgtgcaccaccaagaccgaaagtatccagatacttgcgatagcatccaccgtcccatgatggatacagtggcgcgacaatacgttcaatgttcttgacttgccactgttcatgcatgtagctgaagtcgaacaccacgccgagttgttctttgacgggctcctcgttggcgatgttgtcgaggccgagtacgtgaatcgaaccggcgtcgcggtggatcatgttgaggatgagtttgatgagggtggatttgccggcgccgttcgggccgatcagtcccatgatgtagcccttgggcaggtcgaaggtcacgtcgtccagcgtgaagccggaatcatagtgtttggtgacgtcggtgacctgcaacgccatcgcgtcggattcggatatggcggtcatggccatggtcctttcttgaggttatttcttgcggtattcctcttcgagcatgcggtccaatgcgtccagcggaatgccggcggctttggcgccccggcttgcctcggccaggctttcgcgaatctgggttttgagctgacgttgcatcagttcgttgcccttgtccatcacgaaagtgcctttgccttggatgttctgcaccacgccctcatcggccagttcgttgtacgccctggtgacggtaagtacggagatgcgcagctccttggcgagtttcctcaaggaaggcagggcctcgcccgccttcaactcgccgctgagcaccgccgaacggatttgggttttgatttgctcgtagatgggttcaccggacacggatgagatgatcagtttcacctatgcccctttcgattgtggttgactagcaccccagctgtttagctgttatacaacacagtataactgttctgcttaactgtcaaggtgtgttacataacagttgaacagtgaacaaacacctcgccaacatacagtgtcgaaacatgggccgtgcctacaatggcctcggaagggggcacccatgcccaacaacgcccccgccgacagccccgccagcgggggtgtaacttttttatcacagcacgcgcggagcgtcgtggaagtcgaagaggacgccgtcggccaggtggcagatttcgggccaatcggaggcggaggagtcgtcgtgcatggcccagaccttcatgccgaccgatttggccgacttcatgccgaccagcaggtcttcgaacaccgtgcagtcgaccggcgcggcgcctaggcgcttggcggcgagcaggtagacgtcgggctggtccttgccgacgtcgttcgcgtcatcgacggagacgatatcgttgaacagatcgaacatgccgacgtggcgtagcgccggctcacgcagatgcgggggcagcgaggtggcgacacccagtttgacaccggaggctttcagatcgcgcagatagtcaagcgcgccgggtttggcttcgaccgtggtggaataggcgacgctggccatgtcgtcccattcctgcatgagctcttcgggcgtgtctgtaaggccgaagcgtgcgatggtgtattcggcgatctggcggaattgcatggcggagactttggtcatgtagtcgggcggcacttcgattccgcgcttgttcaggaagtcgatgtcgacttggtcccagactcccatggagtcgaggagggtgccgtcgaggtcgaatatggcggctttggccatttgctaatctccttcttcttcaaccaccctcagtcgcctgcggcgccagctcccgccagcgggagcgtaagccgagaatcggataggagttctcgggcgtggtctagtgaggcttcggattcgctgccggagagcatgcgggcgatttcgtggacgcgggtttcgccgttgacttcggcgatggtggtgaccacgcccaaatcgtcgtcatcggcatccggcggctccttggtgaccacgaactgcgcgtccgcccacgaggcgacctgcgccaagtgggtgacaacgatgacctgcgcgctgcgggccagccgtgccagacgtttgcccaattcgaccgcggccttgccacccacgccggcgtcaacctcgtcgaagatgaaggtctggtcggcaccgccgcgcgtgtcggcggccaccagctccaaggccaacatcagtcgactcagttcaccgcccgaagcgcttttgcccatcggcaactgcggcgacccctcgaacggcgtaaacaggaacgcgatatcgtcgcgaccatacggaccgagcggatcatcggccttgtctcgcggcgtgacacgcacttccaaggaggcgcccagcatggcgagcgagccgagttcttcagtgacgcgcgcgcccaagtcggcagcggcagccacgcgcgcggtgctcagcacgtcggcggcggcgagggccgcagcgtacagcgtctgccgttcggattcgagttcggcgaccttttccggcgaggcgtccagatcctccagatcgaacgccgccttgtcccgccaagcgagcacgtcggccaaggtggggccccaccgacgggtgaggtcgccaagctcgtggatacggccgttgatctggtccagatcctccacgctgccttcgtcgcccagctcccggctcagggcgaacaccacgtcgcccaaatcggcattgatggattcaagccgatcggcctgctcggcgaacgtgccgccgacgcgaatcgcgcgcaacgaggtcaccgcatgattgatgagttccacggccgaagcgccgccggcggcatccacatccacctgcgaggcatccagcgcgcccagcgccgaacccacgccttgggcgatgtcggccgcgttttcgatgcgttcgcggcgcgccttcagctcctcgtcctcccccggctgcgggtcggttcggttgatgcggtcgatggattcgcgcaggtagtcggcctgttggcgggcagaggattcctgcgagcgcaggcgttccagccgctcatccatggcggccagcgcatcccacgccttgcggtaggcggccagttcggcttcgtctccggccaccaggtccagaaactcgcgttgccgtgcggcggccgcgattttcagctgatcggtctggccatgaatggtaaccagttcgccggcgatggaccccagcaccgaacgcggtacggacttgccgccgagcacggcccgcgaacgtccggaagcgcgtacggtgcgggaaaggaacagttcgccgtcttcggggtcgacgcccgcgtcgtgggccttggccacggccacggcagcaccggtgaacccgctgtcggcatcgtcaccggcatcgttggtgtcgccggaatgttcagatgcgacggcatcatccgagagcgcgaaaatcgcctgggcccaagcctcgtccgccccggccgagacgcgcgaggattcggcggccccaccggagaccagtcggatcgcggagagcagcatggatttgccggcgccggtctcaccggtgatggcggtcatgcctgcggccggcgcaatggcggcttctcgaatcggccccagattgcggatatcgagttcttcgagcatcaggctcctgccttgccgtcacgttcgcccggcttgtcgggatcggtaccagcgacgccagcgtcaccggcaacgccagccgcatacgcggccgccgggaacgtgtgcccgtgatgcagcggctggctcgaggcctcattgcgcgcgtgctcgcgccagccgaccacgggcagatcgaacttggagaccagacggttggtgaacggcacgccggagagtcgggcgaggcgcaaggtatcgcgcgattcgcgcaccatgacgcgcgtaccctgcggcagggcgcgctggcggcggccatcgcagcaaatccagccttcggacatggaatcgtccagaatatcgatggtaaaggtcgaaccggagccgatgatcagcggcctggcgaacagggcatgcgcggccaacggaatcaactgcagggccttgacgttcggccacatgaccggaccgcccgcggagaaggcgtaggcggtggaaccggtgggcgtggagacgatgacgccgtccgcgccgaacgagttcatctccacatcgtccacgcggatggacagttcgaccatcttgccccggtcggcgcgttccagcgtgatgtcgttcagcgcccaatcctcaatgggcttggtggtgccaggcagccagacgtccacatgggcgatcatgcgttcgtcgatcgaatagtcgtgggtggcgacccggcggatcgcctcgtcgatctggaagctttcgaattcggccaggaagccgacatgccccatgttcacgccgagaatcggcacctgggtgcagtggacgagttcggcggcgcgcagtatcgtgccgtcgccgcccaggaccacgacgatttcggtgtcgtccgacacgcacggcggctgcacgccgaaatcgggggcctcggtgttgtcgatgatggtgacttcgaaaccggccactcgcagctggctcaccgcctcggccactacggttccggtctgcctgagcctggtatgcgtcaccaccaccgcgttgcgcttggccatggcatcctcctgtcgattcggtcgcactgctcattattctagccgcagacaccgtcatcactcgtacaggtgttcgaaaatgccgcttcgtggcgcgtcgccgacaacgttccgcagagtcgattaacgtaaggcttcggcatacaatggcatacagccgcgcgatcaccccccatctgctcacatcgtgaccgatataacccccctcaacatggatgcgctcattattggggcaataagccataaagctgtacgtccatattgagggggctttatcatcatgggcaagcatacgcagaattgcacgttgataggcaaaggagtctacggcaccataggagtggaccaacgttcccgtcttgccgatggcgcgcattttcacaccatgattgtgaccagcaccctcgaggcctcagttatagaaggggacaaactggtcatcaagagtggcattgtgcggtgtgatggtgatattcgcgtatccagcatcagcggcagcggcgacatcgaagtcggcggcgacattatttgcgatgaaataacctttaccggcaaactgcgatgcaacagcgatatcgtttgttccggaaatctgtccgtcaatggctccctaggcacccgtcatattagcggtcagacagtccgcttgaacggcgtgttgaagggtcatgacgtcaacagcagggctctggaagttcatccactgcgcagtacgatgttttctcgttttgatatggatgggtatgaggatggcagcatggttcgccatatcacagccgtcacggttgaagccaaccatctgcaatgccggactttgacggcggactccgccatgctacgcaacggcagtgcggtggaaagcgccacgtgtgccaccgcaataggcatcgaccgtacctccagcgtgctgctggtgaacggagactgccgacgcattcatctcaagacagcgtaaagcaggtattcctcattaccgtgggtgccgatgatgggactatcggcagtggccaccacgtcaagtccgtgctgttcagcacaggcgaccacgtcgtgcaatgcccgctcccgcaatgccggatcttccacgatgccgtttttgccgagtcctgcccgcccgacctcgaactgcggtttgaccagtaacacaatctgcgcaccgggagccgcgatgcgcgcgattaccggaatcacataggtcagggaaataaaggagacgtcggagacgatcatcgccggccggtaaggcaggtcgtcggcctctacttcgcgaatgttgacgccgctcatttcgatgacgtgctcgtcattggcgatgcgcgggtcgagctggccgtggccgacgtcgagcgccacgactttggccgctcccccgcgcaacagtacatcggtgaagccaccggtggaggcaccgatatccagacattccaagctttccggcccggtaaggccattgccggcaaaggtctcgaacgcgcccaagagtttgtaagcgcctcgggagacgtagtcgtcgcccttatccacggcgagttcgctgtgcccggctttgaccatgaacgatggcttggtgatggtctcgccgtccacgcgcacatgcccggctttgatgagtcgctgcgctttggcccgcgattcgaccagtcccgaagccacgagtatcatgtcgaggcgatcaagtggggtcgcgggatcgatatgttgctcggtcatataccttcctttcgacccaccatccaccaacggggtggctcggcatggacccaccatccagcacttcacgtcatcttccgctggcgggagaatgaatctcctctgctagctgcggctgttatcaagctcgtgttgtaacgattccagcacgttgcgataggtctcaagcttgcggtcgttgtcttgttcatcaatatccgcaagttcggggtatcgctcggtgaccggcgcgtgttcgctatccgtaggcataggactatgcctcgatggcgaacaccggtaccgtggcctcgctgagctgtgcgccttggtcggcggcttcccatgcggcgcatacggcggcacgcaggccgtccatactggtggggtcgctgacgtgtacctggccgttttcaaaccaagcgctagccttgcggcattcccaagtaccgctctcgtcgcggaccggctccggttgggcttcgccgagttcacgcagatcaagggcgatgaatgtgggcctcaggtgtgccggagccagcatcagttcggtcgggttggtgacaccggtcagcaccgccagcgaatcatagtcaccgcggttaccggcctcgatatcagtgtcgagtcggtcgccaatggcgatggacgcctccttgggcaccagatcgtggccttcggcggcgttcagttcgcgggcctcatcgtacatgtacgcttccggcttgccagcggaggcgaccggttcgacgccagtggccgtgatcacggcgcgaatcatcgatccgcaaccgggggcgatgcccagttcacgaggaatcgtcaggtcgcggttggtcacgaaatacgtggctccggcctcgaccgcgaacgcggcatcggccatcatctgccaagtcatatccggataccagccctgaataacggcctgcgggcggttctgaggaccgtccacgatggtcaggccgttgcgggtgacctcatcgcgcaaatgctcggcgcccaatacctgtacgcgcgcgccggcgggcaacgccttggccaccatacgggcggccaccaccgaagaggtgatgacctgccacggctccacgtccaagccgaagcccttgagctggtcggccaccacgtgctggaagcgcgaggagttgttcgtggtgtattcgatggtcatgccggcggcttcggccgcacgaatggaatcggccgcgtattcgaccggattcttgccgcgatacaccacgccgtcgaggtccagcagcgcaagctgataggcctcggcgagcgggcgatcggtgcctttgaggaaacgggtcattacgccgctcactcctcggtttcggtctcggtctcgtcggactcagccggttcaacggcatcgtcagcggactcggaagactcctcggcttcagattcctcagattcttccgatgcatcctcggactcagcattttcgacatcggcctcatcggactcggcatcgccgtcttcagcctcgtcgtcctcatcgccgtattcctgctccggatccggggcgtactgcgcctcgtccggatcgatgccgagcttctcgagcacgtcggagtcgtcggtgatgtcttcgagatcgtggtcaatcaccacgtcgtcgctgttttcgtcaatctcctcgtcggcatactgatcctcaagacggtccagcaggtcattaagctgctcggcttccttgctgcggccggcctcttcaaggaagtactgctcggcctgcacggcacgcatacggtactcacccggaagaccctgagagcggccgacggtatgaaccacttcaatggccttgtcccacatctccaaatcgccaagggcaccggcatacaccaggaacatctcgaccttgggagcgccatgcagctgcttgccctcatcggacagcgccagttccacggccttcttcggttcaccgacaccacgctcgcagtcagcgatgaacggcaggtagtcgaggaagccgttcatacggtaggcggtacggaactcacgcagggacagcttgtagtcgccctgacggtaggccacgaacgcgagcgtctcgcgggcaaagtcgatgcgggaggcctgacgggccacccacttggcgtgctccaaggcaagttcgggatcgctctcctccagcgcgaaagcggcgaggatgtgcagaccaatgttctccgcgtgctccttggacaggccgcgcagacgttcgcgctcatccttggacagcatcgaccattccatgcccttgggcatcttgggctcgtcgggacgacggtcggtgtacgggttctgcgaggggaagctcatcgtgccgtcggagttacggcgcgggcgcctcatgtattcagagcgcttctcctcacggtactggcgcttctcttcctgcgaaaactcgcggaattcgccgtcacgacggttgttgtcgcggcgatcgtcacggcggaagtcacgacgatcatcgcggcggtcgtccctgcggaagttgcgacgctcaccatcgcggcggaaatcacggcgatcgttatccctgcggtcatcgcgacggaagtcacgacggtcattgtcacgacggaaatcacgacggtccccatcgcgacggtcgtccctacggaaatctcggcggtcatcgttgcggcggaagttgcgacgctcaccatcgcggcggaagtcacggcggtcatcgcggcggaaatcacgacgatcgttatcacggtgctggtagcgcggattctcgccgttctcgccttcgtgggaacggtagccgccttcgcggcgcggcttgaagccttcgccgtcacggcgcggaccattgccgcggtaaccgcccttgccgccgaagccggagcggccgcccttgtggaagccgccggacttgccgtacgacttgcggtagccgccgtggccctcgccatcaccgtcacggcgcggcgcgtagccctcgccatcctcacggcgacgcggcttgaaaccctcaccgtcatgacgcggcttgaaaccgcccttgccgcgcggcttgaaacccttgccgccgcggttgcccggtcggcgatcgccataccccttatggccgccgccgtaggacttgccggaacgctcgttaccttctgccattacttgttttccttaattcgttgttgattaacggttttccacggcgccgagcgccttcttgccacgacggatgagcgcgaagcggcctgccaggaaatcggcttcggccagcacctgctcctcatcctcgatacggttgttgttgagatacacgccaccggacttgatggcgcggcgtgcctcggaagcggacttgaacagtccggcagcctgggcggcgtcgattacgcgatcgccgggcttggagacggggaagacgtgctcgccgttctcgtcgaccaccttgaaaccgtcgagcacggattccagcgtttcctcatcgatgtcttcgaggttgccaccgcgtccgaacagcgcaccggaagcatcgatggcagcctgggtagcggcctcgccatgcacgaagctggtgacctcccaggcgagggtcttctgggcctcgcgcttgccggggttggtcttggattcctcgaccagtcgttcgatttcggccttgggcaggaaggtgaacgccttcagcaggctttccatctccacgtccgggcggttgatccagaactggtagaacttgtacgggctgagcatcgtggcgtcgagccagacggcgttgccctcggacttgccgaacttcttgccggaagcatcggtgataatcgggctggtgaacacgttgacgtccacaccgcgcaccttgtggatcaggtccaggccggaggtgaggttgccccactggtcggagccgccgagttccagcgtgcagtggtattcgtcaaacaggtggaggaagtcgttgccctgcagcacctggtagctgaactcggtgaaggagatgccttcctcagagttcaggcggcgggcgaccgtgtccttggcgagcatggtgcccagacggaagttcttgccgacgtcacgcaggaagtcgatgacggtcatcgaggcggtccaatcgtaattggacacgaaacgtacggcgttcgcactttcggtgtccagaatgccaccgatctgattcttcaggcgatcggcccagccggccaccacatccttcgggttaagcgtacgttcgccggactggcgcgggtcgccgatgagtccggtggcgccaccgaccaaagcgatcggatgatggcccgcaagctgcaggtgacgcatgttgatgagctgcacgaggttgccgatatgcaacgatgcagcggtgggatcgaagccacaataataggtgatgggctcgccgttcagtgcttctgcgagtcgatcccggtccgtggactgggaaatcaacccgcgccattccagttcctcaagcagggtgttgaaacccgcttccttgaagtcggtgacgtgagccatagcttgtcgcttctccctatcgaattgtgaataagactgcccaattgggcacagtcaagtttcgcagaacatggcgacagtgccgaacaccagccgagccgcgcgattcagtaaaacgccttattctagcggcgcgggcccataagttcgcgcaaagagtcgatgatgtcctgacgatccggcacctggaacttcgggaaggacttgagcatacgcttctgctgtgcgttgatgacgccattgacggcccagcgcagacgctcaaccgtatcctgcgaaagctcacgcatcctgtcggataccgcactggagccccactgccacgtgccaccggcgcgtgccgccacatcctgcaccacctgagagacggaatcgagcacctgctcgaattcgagcatgcccgcaaccgtgaccgccaagtcgatgatggtgatcagggccagtaccgtgaccagcgtatgcagcatcggcagcggaatcatatccgtgacccgctcgacatatggctgcgaaccaagtaccacgcccacgccgccgaggccgaaaatcaacgcgcccagcaggcagacgcggccttggaggttgaagcggaagttcgagtaatcccaccagcgggcgtggaacagctgctccatgacccacgaggttgtgtattcgagtatcgtggcgcccaccatcgaaatcaggaagatgatgatcgggttatgtacgttgccgagaatggcgacgccgagtatcgcgccggtgccgtagatcgggcacagcgggccgttgaggaaccctcggttgaccaagcggtgctgttggcaggagacgagaatggactcgtacatccagccgacgaaactgtagaacagaaaccagaggaaataatgttcgagtgtgatgatcatcgacgggcttcgatctcggcgtaaggcttcgcggcgggcaacgcgcgcttgttgaaccggtcgagagagaaggtctcggcggtggcggagcatttgtccgccaaggtgaccagatagccttcgatatagcgcggcggcaccggggtcatcgggaacatgtggttctcgatgctgttgcgttcgatatcgttgagcttgaagtccttcagggcattgaccagggcggcgtggccatgggtgaagccatgccactggtgttcgccgttatcccagtcgtgccagtcgtacaggaagtaatcgtgcaggagggccgcgcgaatcagggatttgaggtcgacgcggtaccacaggtgtgcgcggtcggccatccgcacagccaggcaggcgacacgcacggaatgttcgaacgtggtgacattgccgtgctggtagcagcagcgttcgatctgcatgtggcgatgctcgatgacctcacggccgtgcttggcgaccaggcgttgaatctgcgttcgggtgagcagatgtcccacgattttcggtccttcccgttttgggttggttcagtgcaatcccctgttgtgaattacgattacccggcgatattcaagaatccatcgagtaataccgtgaccgattgtagggcacaaatatgtccgtgcacactcatccaaaagaacgacaacgggaaccgttaatcgtggtgggtttcaagatagtcgagataaccctgaaaaccgccatcgaggcttgctacatcgtaaccgcgatcggcaaggatttcagctacttcctcgctccaccatccttgagcacaatagactacgacagttcgatctgtgggcacggttttgagcacatgggccagagggtcgagtggtgcattgatggcaccttcgaccgggtgggcggcgaagtcggctggttccctcaagtcgagcagcgtgaccgtattcgggtcgagcttggcaaattccgccggcgtgatgcggcggtacgatgcttcattgctctcatcgtcatcgaccgcattacgcaaagcaataggcatgttcttcccctctcgttccgatcttggctcccctcaaggaggggtgccacatagctctaaatcgcgcaagccggctgaatatagttggccggatcaatagcagtaatggtcggctgctcaccgcacaccgggcagtcgggcacatggttcggcaacggcacacggcggatgttcatggtcagggcatccacagtgagcatacgagccacgagcggctcccccacgccggcaatcagcttgacggcctcagtcgcctccagactgccgatcacaccgaccaccgcgcccagcacgccggcttccttgcaggtcggaatctcaccggcggcgggcatgtcgcggaagatgcagcggtagcaggggccttcgccgggaatgacggtcatcacctgaccggcgaatccgaccacgccggcatggatgtacggcttgccggccagcacgcaggcgtcattgatgaggaattttgcggcgaagttgtcggtggcatcgatcaccagatcgtacggttcgatgaggccggcgatgttgctcgcgtcgacgagctcgtagtaggtatcaaccgtcacatccgggttgagcgcgcggatggccgtggccgcggattccactttgggcgctccgacacgtgcagtggtatggatgatctgacgttgcagattgctcatatccaccacatcgccgtccaccagtccgatatggccgacgccggccgccgccagatacagggcggccggagagccaagcccgcccgctccaatgatgagcacgctggaggccaacaaccgcttctgccctttgacgcccagccccttcaaaatcagatggcgcgcgtacctctccacctgttcatcagtcaatgccatgttttctccatgtttccagctcccctcagtccgctacgcggccagctcccctcagagaggggagctaataaaagtgtcagtgcaaatatcccgtagtcggactggacggcacggcctgtccctcggtcaccttgcccagaccggacagatacgccgcacgaccagcatcgatggcgtgcttgaacgcctcagccatcagcgggatattgccagcagaggcaacggccgtgtacgccatcaccgcatccgcacccatctccatggcgtcgcatgcctgactcgggcgtccgatgccggcatcgatgatgaccggcacatgcgcattggcgatgatgatctcgatgaagtcacgcatgcgcaggcccatgttggagccgatcagcgaaccgagcggcataacggcggcggcaccggcctcctccagctggcgtgcggcaatcgggtccgggaacatgtagggcatgaccacgaagccttccttggccagcatttcggtggctcggatggtttcggcgttgtccggcaggaggtacttggtctcgtgttcgatttcgaccttgacgaagtcggtgtggcacacttcgcgtgccagtcgggcgatacgcacggcttcctcggcgttgcgcgcaccggaggtgttgggcagcaacgtgatgccttcgggaatgtagtcgagcacgctgttctcggtggtctgcgcgcggcgcagtgccatggtgacgatttgcgtgcctgcatgttcgaccgtggccttgatgaggttcaggtcgtagcggccggagcccagaatgaatcgcgactggaactcgtgaccgcccagggtcagcggcttgtcttccactggcagaatcggcgcggcggtgccgaccggattggtgacggcgggctgcggcggcagcggagtcgcctcaacagatgcttcagtaaccggattaatattgctcatagcttttcctttcatccaccctgtacaaactgcacaatttccatgacgcactggtcgtcgagcatggcgtcggcacgcttatcgcgcgggataatctcaccattgagttcgatggccacacgctcggcgcggaatccgtgcgcttcgagataatcggcgacgctgaccggcgtctcgagcgtgacctgctctccgttgacctgcataatatcctttcagatagtaaaaaagggtgcacgaaacgaaccgtaccttaagtggtgcgcccattcatgaacccaatcatgcgaccgttcgaccgctgtgatgtattggctccatcacgaccgtctcacggctgaattatgcaaacggaatgaaagctgtatcggagaacccggcaaatctgcaacaacgattccttacggcggcatgacccgcgtcaagttccccggtcgaagtctggcgacttcctctcagcctcacggctcccgttcgttacgatttctcagtgtatgccgttgcagtgacaacagcaaaatagagctccctctgacgagggagctctattgggactagaacgtgccgggggctttgtaggcggagccatccgacgtggatgcggggaagagcttgagttcttcgacctcggccttggcgtcggcgatctgctcgcgcacgcgaccgtaagcggtgccgcccttgccgttgcgggagtcgaccgaaccgtggctggagagcacttcgcgtactcccggagccttgtcggccggcaggaacgcggcgaaggtctcgatgaagtcattgtcggtcagatcccacagttcctggccgcggccttcggcgagcttgacgcaggcaccagagagctcgtgcgcatggcggaacggcacaccgttcttgacaagccattcggcgatgtcggtggccagcgcgaagccggtcggggcttcctcttcaagccgctcgctgtcgaagtgcatggtcttgaccatgccggtgaaggcgggcagcagcacttcgagcgtatcgacctggtcgaacacggcctccttgtcctcctgcaggtcgcgagcgtaggcggtgggcaggcccttcagggtggccagcagaccggtcagatcgccgatgagtcggccggacttgccgcgggcgagctcggcgatatccgggttcttcttctgcggcatgatggaggagccggtggaatagccgtcgtcgagcttgacgaaggcgaactcctgggtgttccagatgatgatctcctcggacaggcgggagatgtccacgccggtcatggcggccacgaacgcgaattcggccacgagatcacgtgcggcggtgccgtcgatggagttgtcggtcacgcgggagaagccgagctcacgcgccacggcctccgggtcgaggccgagcgtgttgccggccagtgcgccggagccgtacggagaggcgttgatgcgcttgtcccagtcgatcagtcgctgcacgtcgcgaatcagcggccaagcgtgggccatgagctggtgcgcgagcagcacgggctgggcgtgctgcatgtgggtgcggcccggcatcacggtgcggccggccttttcgctctgctcgaccagggcgttgacgaggtcaagcaggagtccggcaatcgcacgggagtggcggcgcagccacatacgaatcaggcaggcgatctggtcgttgcgggagcgtccggcacgcagtttgccgccgagttcgtcgccggcaatgtcgatcagtccgcgttcgagggcggtggcctcgtcctcatcgtcttcgatgggggcgaaggagccgtcatccacatgacgctggagcgtgtcgagcgcatcctccatgcgctgcagctcgtcggcggtcaaaagtcccgcacggccgagagcacgggcgtgggcgcgggaaccggcgatatcgtcgtcggccaagcgccagtcgaactgcgtggacttggacagtcgggccagttccggcgacggaccggacgtaaagcgaccaccccacagggccagatgttcgttgttctcagtcatgaaggctccttgaaaagtgaaaatagctgtgtttaagcgtagcaatgtgttcaaacatacagttgcccccgctggcgagggctgtcacatggagtgtgactgaggacagtcctttcaaagaccactcccagtcagctatgccgacagcctcgcagcgggggcgactgagtaagaattactcgacggtgttcttcgggacctcgatgccgttgccgaacttgacgtcgcgggctgcggccacgcgggacggcaggccatagatgtcgatgaagccgttggaggacctctggtcgaaggtatcgccggaatcgtaggtggcgagcttgtagtcgtacagcgaggagtcggaacgacggccggtcaccacggcgcggccaccgtgcaggaccatgcgaatctcaccggacacgtacttctgggtgtcttcgatgaaggcgttgagcgactgggttgccggggagaaccactgcgcatcgtaaaccagctcgccccagcgcttgtcgatgtcgcgcttgatgcggtgctgttcgcgttcgaggcagcagttctcaagctcctgatgagcggtaatcagggccacggcacccggggcctcgtacagctcgcgggacttgatgccgaccaggcggtcctcgatgaggtcgatgcggccgacgccctgggctccggcgcggcggttcatctcttcgatggcctgcagcggagtgacgtcacgtccgtcgatcttgaccggcacgccttccttgaactcgatgacgacttcatcttcgaccggcgggaaggccgggtcgtcggtgtaggagtagcagtccttggtcgggccgttccacggatcctcaaggaagccggtctcaatggcgcggccccacacgttctggtcgatggagtacggggacttctcggtctgggtgatcggcagcttgtgctccttggcgaacgcaatctcgacgtcgcgggtcagggacaggtcgcgaatcgggctgatggccttcagcgtcgggtcgatggaggcaatggagacctcgaaacgaacctggtcgttacccttgccggtgcaaccgtgggagatggtgtcggcaccgaactggtgggcggcgcgcacgaggtgcttggagatcagcggacgggagatggcggagaccagcgggtagacgccttcgtacatggcgttggccttgagggccttcatgcaatattcgttggcgaactcgtcacgggcgtcgaccacgtaggattcgacggctccgcaggcgagggcgcgctgcttgatggtctcaaggctttcgccgccctggccgacgtcgagggacacggccacgacgtccttgccggtgcgctccttcaggtacgagatggcgacggatgtgtcaagaccgccggagtaggccagaacaatgcgcttgttatctgccattggttccctttcattcaaggtctgaaaaacaaactgatgcaagtatatacagaggactgtatatttatgcacggcgtgttggttatttggaagcgaggcctagtagccagtcggagcgggagacggcggtgtcgtcattggtgcaaatcaccatgacggtgtcgtctccggcgatggtgcccagcacgccttcgatcggctgcttgtcaatcaccgaggccacgtattgtgcggcaccggaaggcgtgtgcaccacaaccagatttccggcggcggccaccgaggtgaccagtccgttcagcacgcgggacatctgtgcctcaccgcgctcccctacatcctcaccttccgaagcaacgacgctgcggcccaccgtgtaggccaccgtgccgtccttcagccgggtcttcaccgcatgcatctcgtcaagatcgcggctcagggtcgcctgagtcaccgcaatgccctcgtcgataaggattttggacagctgtgattgcgaggtgatgatatgcgtggcgagcgcctgttctatggcactcagccgcgccgccctggtggcagggcgctgcagggacggaccggtttcactcatgcgagcaggctttcgtctccacgggccttgccggtcaaccaagtcagcaacgctttctgtgcgtgcagacggttctcggcctcatcccacaccacggactgcgggccgtcgatcacttcagcggtgacttccttgccgcggtaggcgggcaggcagtgctggaagagcgcatccggcttggccaatgccataagttcggtgttgacctggtaatcccagaacggtttggagcggatggcgtattcggcttcctcgcccatggagacccaggtgtcggtgaacacgcagtcggcgtccttcaccgcttccttggcatcggtggtgaccaggatggagccgccggtctcggccgcgacgcgcttggcgtcggccacgatgtccgggcggggcaggtagccgtgggggccggccacgcgcacgtccatgccggccacggcaccgccgagcaggtaggagttggccatgttgttggccgcgtcaccgaggtaggcgatggtctggttcttcaggttgtcgacgccgcctcggtgctcggcgatggtctggaagtcggcgagaatctggcagggatggaagtcatcggtcagggcgttgaccaccggatgggtggagtacttggccatttcttcgacgcggtcctggccgaaggtgcgccacaccacgccgtaagccatgcggtcgagcacacgagcggtatcggccacgggctcgccacggcccagctgggagccggacttgtcgatgaccagcgggtagccgccaagctcggcaacgccgatggagaagctggaacgggtgcgggtggagggcttgtcgaacagtacggcgacggcctgcggaccggcgaacggctgcttgtagaagcggtcgtggtggaacttgatggcaagttcgagcacctgcttctgttcctcatggttgaggtcgtcgtcacgcagcatgtggcgaagttctggggtcatgatgatctccttggatcggtgggtcggcagtgacagagagaaatcagtcgtcgggcaggtccgtaggcacatccttgaggatggcaagtgcctggtccacgtcttgtgcggttacaatcagcggcggtgcgaaacgcagcgcattgggagccaccgcgttgacgatgagcccgtgttcgaggcagtagttcatcaccgcgtgggagcagggatgcttgagctcgacggcgtccagcaaaccacggccgcgtacggaaacgaacagcggattaccggtggccataatgccatcgcgcagctgttcgccgcgagcttcggcgttggccaccagattctcgtcttcaatcacgccaagagtggcgagtcccgcagccgcacccagcggattgccggcaaaggtggagccgtgggaaccaggagtgaacagagccgcaagtttctcgccgaaagcgatcatgccgcccatcgggaatccgcctgccacgcccttggcgaaagtcaccatatccggcgtcacgccgccggacagatcgtcacgctggaatgcgaaccacttgccggtacgtccgataccggtctgtacttcatcgatgatgagcagcgcgtggttgatatcgcacagttcgcgcacgaacttgacgtaatcggcgcccaacggctgcacgccggcttcgccctggataagttccagaatcacagcagccaccggacccttgccatagcggccgagaccggtctgtgcaaaagcgtcgtgcagggcgaccttgtcgccggcgcgtacgaattcaatgttcggcaccagcggatcatacggcttgcggataccgggtttccacgtggcggacagcgcacccatcgtacggccatggaagccgtgagtcattgcgagaatgcgtgcgggcttgccgccgatggaaggcagggcaccaggcaaggtgcggccatacagcttggcaagcttgagggcagcttcattgccttcagcaccggagttgccgaagtagactttggagccttcaggtgcaccagccagcttgaccagtttggatgccagctcaatttgcggctcggacgcgaaatagttgctgatatgagccaccttggcagcctgatcggcaaccgctttgacccacttggggtgggcgtatccgagggaattgacggcgatgcctgccaggaaatcgaggtattcgttaccgtcaacatcccagatgtgggcaccttggccgtgatccatgacgcgcaacggcgtaccgaacacattcatgtggacctgagagtactctcccagccacttgctgtcctccgtacctagtttttcctcatgctcagtagccataagagctcctcatttccagtccttcatcgggcataaccatggtaccgatgcctgcggaggtgaatatctcattcaaaatcgaatgcggcttgcgcccgtcgatgatatgggcttggggcacgccaccgtcgatggccctgacacaggcctccatcttgggtcgcataccggattccaggtccggcagcatatcgcgcaggttttccacaccgatccggccaatcagagaattcttgtccggccaatcggcgtacagaccatccacatcggtcaagataacaagcttgcgtgcgcccacagcggcagccaaagcggcggcggcggaatcggcgttcacgttgagcacttcagtggcatcttcttcgttcggagccacggaagagacgaccgggatacgaccggcggccaccagatcctcgactgccgaggcatcgacggaaaccacatcgccgaccaagccgatatcggtgggcttgccattgatgatgggcctgcgctgcatggccgagaacaggccgccgtcttcaccggacaggcctacggccagcgggccgtgcgcgttgatcaggccgaccagttcgcgtgacaccttgccggtcaggaccatgcgcaccacgtccatggcctcgggggtggtgaccctcaggccgcctttgaattcggatttgatgccgagggccttgagcatgtgggagatctgcgggccgccgccgtgcacgacgatcggatgcaggcccacctgacgcaggaagaccatgtcttcggcgaagcactgcttcagatggtcatcgaccatggcgttgccgccgtatttgacgacgatacgctggccggcgaactcctccagccaaggcagcgcttcaataagcacttctgccttctgatcggcgcgcaaatcggtgtgcacgtcgaaatggaacccaggtcccttcaattctgtagccaatttttctcttttctgcgacgccggcgacgctatcgctgccggctgctacaaacagcccactgggctgtttgcgttatatgcgacgccggcgacgctatcgctgccggctgctacaaacagcccactgggctgtttgtcagctttcgtagtcggcgttgatgtggacgtattcgtgggtgaggtcgtcggtccagacggtggcctcggcgtccgagccggtgttcaggtcgatgtcgatgtggacttcgcgcggggtcatgtcgacctcgctgcggtcgcggccggcgccgccgttctcgcagatgcgcacgccgttgacgtccacggtcaccttgttcgaatcgtaaggcgcgacttcaggcggcacagtgcccaaggagctgacgatgcggccccagttcggatcgttgccggagatggcgcacttgagcaggttcgaggcggcgacggcacgaccacaggcaagtgccgcgtcttcgctggtggcaccggtgacggtgatgcgaatgtcgtgggaggcaccttcgccgtcgccgatgatctggcgggacagggagacgcaggcctcacgcaccagcttgttgaattcgtccttgtccggttcgacgccggaggcaccggaggcgagcagcaggaccgtgtcgttggtggacatgcagccgtccacgtcgatgcggttgaacgaatgttcggcggccacggcgagtgcggcctgcatctggccggcggagacgaccgcatcggtggtgatgacgcacagcatggtggccagctgcggggcaatcatgcccgagcccttgaccatgccgccgatcttccagccgttggagccggtcagttcgaccgtcttcggcttggtgtcggtggtcatgatggcgtgggaggcgtcggcaccggcttcggcggtggcggcaagagcctcatgggcactcttggcaccagccagcacgttgtccaacggcagcagttcaccgatgagaccggtggagcagacagccacatcattcggttcggcgccgatgagaccggcgaccgtttccgcggtggtgacggactgggcgtaaccggcctcgccggtgcaggcgttggcaccgccggagttcagaatcacggccttgacgtgaccgtcggcgacgaccttacggctccactgcaccggggcggcacagaaacggttcgaggtgaacacgcctgcagccgcgtcgagcgggccgttgttgaccacgagggccaagtccttcttgccttcgacggatgaaataccagccgccacgccggcggcggagaaaccttgtgcaaatgtaacgctcacggtgctactccgatcttggtcaggcccgcgtcttccggcaggccgagtgcgatgttcagtgattggaccgcttgtccggcggtgccacggttgaggttgtctatggcggcaaaagcgtagatgcggccggccttgcggtcggcgacgacctgcaggtgggctgcgttggatccgatgatgttgccggtggcgggcagtgtgccctcgggcagcagcaccatgaagtcctgaccttcataggccttggaccatacggcacgaatctcctcatcgctcagtgccttggccttgtccgtcatgcgggcggacacggtggcgaggatgcctcgggacatgggggcgagaatcggcgtgaagccgagcgtgaattcgctggcttcggccgcgctcttgccggccgcgtgggcgaagttctgcagaatttcgggaatgtggcggtgcttgccgcccaccgaatacggcagggcggattgcagggcctcggcggcaagcaggttggtgcgcttgagattcttgccggcacccgagtatccgacgaccagatcggccacgatatcctgcgattcaaccagtccttcggcgatgccgggctggagggccagcgtggtggcggtgacgttgcagccagggcctgcgatgcgcttggtgccaggaagcgccgcgcgctggcgggtgtatgagccgtccgcggctttgccggtgatgagctcgggcatgccgtaggtccaatgctcatagaaatcgccgccgtagaactcatcccaagcggcctgctcttcgagacgatggtcggcgcccaaatccacaaccacggcattcggatcgagctgcgaggcgagcttgcccgaagcaccgtgcggcagtgcgaggatgataacgtcatgcccgttcagcacttcgggcgtggtatcttcgacgaccagattggccagttggggaatatgcggcatgtgcttggccatcgactcccccactgaggaatggcctgccacgcaggtgatgtcgaagtcggggtgcgcggccagaatgcgcagcgcttcaccgccggcatagcccgtggcaccggccacggccactgtatatttcgccatactcatctcttttcactgatgtttcttcggatgagtatacgcgattatgcagactattgcatatttatgcagtgggtgtgttggtatgtgaacgctacttatgcggagatggagtcggaggaggagccggtgccgccggtgagttgctggagggcttcctggtagaggctcatggcgtcatagccattgaaggccatccagatgacggcgatggtgtacagcacgttgatcaccacggcggccacagccaaaccgaagcctttcatatggaaggtgcgcgtgcgccacattgccaccgcgcccatcagtgccgagagcattggcaccgggaagaacagggcgaggataaaggagatgatcgcatacgaatcccagtgcccgtagagtgggttctggtttggatcgttcaggtcgatgccgtggtaataatgcggctggtgaggctgaccgttcggctgttgaccatacgactgcccctgcatgcccgggtacccgcccggatatgcgcccggaccggactgttggccgccttgagcatacggccagccgcccgcctgctgattgccgggccacgccggctgctgaccgtacggctggccggcctgctgggattgcgccgcgccaccgttgatgccagcggctgcggcggaatccttcttggtatccggctcgggagcgccataaatatacgggttgtaattcggcccgtattggccagacatagcaccatattcaggctgctggcactgcccgtatttcggcttgtcctgctccggttggctcatgacgctcctcgattcggatgattggttgggtcaggcgcgcagctgggcgccgatttcggcggcctcagccacgatggccttgcggatggcgtcgctgtcttcggcggacagcgtcttgctcggcgaacggaacaccaccgcataggccagggacttcttgccctcgcccacctgttcgccggtgaacacgtcgaacagttcgatggattcgaggttcgcgccggcggccttgcgaatcacgttctcaagctggcctgcggtcacggtctcgtccacggtgaaggccaaatcctgcttgaccggcgggaacgtggagatcggcttggcctggacgggcttgccggtcagcgtggcgaacagcgcggtgaggttcagctcgaaggccgcggaatgggccgggaagccgagcgcctcgttgacgcgcgggtgcagttcaccaacccagccggtgaagacgtcgcccaccatgacgcgggcgacgcggccggggtgccattggacgggcacatcgtcggcggcgggctggtcgagttcgattgcggcaccgatacggccggcgatgcggcgcacggcctcgacggcgtcggaccagtcgaccgggcgcttgccgcccatccagccatcgtcctcggccagaccggtcaggatgccggccacatggtcgggctgttcgggcagaccggcgtcaagcgcggcgagctgttcgtcggtggggcgcacgccgccgggcagtgccgggatggcgggcgcgttcggatcccacaggtagacgtggccgagctcatacagggacacgttttcgatgccgcggcggatgttgcgctgcacggtggtggccagggtcggcagaatctcgcgacgcaggtacggacggtcgccgtagagtgggttggcgatctcgacgctgaccttcttggtggcttccgggtcgaagccgaaggccttgtaatcgtcgtcgcccacgaacgggtagctcagcgattcgaccatgccgaactcggcgagctcgtccgccacgcgacggcgacgctgctggtccggggtcaggcccaccagaccctcgaccggtgccggcggcacggtgatcggaatctggtcgtagccgaccagtcgggcgatttcctcgaccaggtcgcacggctcgttcaagtccggacgccagctcggcgcggttacggcgaactcgccgttgccgccgccggccaccgtgcagccaatgtcggtcaggatgtcggagatgcggttgatgtccacgtcgaggccggccacgcgggccacttcggaggccttgaagtggatgaccttggcgcgcggcgtgttgttcacgtcgttcgggtgttcgctgggctcgccgttgccgtacttggccatgagctcggcggccatctgggtggcggcgggctgcagcgcggtgtcgacgccacgttcgaagcggcgggaggcctcggatggaatcttgtggcgacgggccgaacgggcgatggtcacctgatcgaagtgcgctgcctccagaagaatgttcttggtgtcagcggtcacttcgccatacaggccgcccatcacaccggcaagaccgaggatgcgcgagccgcgttcgccgttcggcgaatcggtgataagcagatcttcgacgctcaggtcatgttccttgccgtccagggtggtgagtttctcaccctcgttggcgcggcgcacgacaatcgggccttcgagcttgtcgaggtcgtaggcgtgcatcggctggccgaggtcaagcatcacgtagttggtcacgtccacggccaaggagatggagcgcatgccggcgcgaatcaggcggcggcgcatccagttgggcgtgtgggcgttgggattgaagtccttgacgatacgcgcgtagtagcggtcgcaaccgggcacgccgtgaatcggattgttatcgtcgatttcaacatcgatgtccaccggggtgccgggctggtagtcagcaggttccggggccttctcgttcagtgccacggccggatcggtgtaggcggcaccggtggagtggtggtattcgcgggccacgccacggtaggacagcgtgtagccacggtccggggtgatattgatctcaagcagaggctggtcgaggtgcagcaggtgcatggcgtcctgaccaggcttcagagcctcatattcagcctcggagaagccgtactgacgcagcagaatgatgccattgtggttgtcgcccagacccagctcacgttcggaggcacacatgccgttggagatgtggccgtaggtcttgcgcggctcgatcttgaagtcgccgggcagcacggcaccgggcagggtgacgacgaccttttcgccggccttcatgttgggcgcgccgcagatgatgccgcgcggcaccttgttgccgtcttcgtcggtctcgttccattcgtcgccgcagtccacgtggcaccagttgatggtcttgccgttcttctgcggttcgggggtggcgtcgaccacgtagccgaccacaatcgggccggtcacctgggaggagtggatctcctcttcctcaagacccaccttgacaaggtccttggcgagctgttcgtaggtcaggccttcgggaacctcgacatggtccttgagccaatcgatatcgatcataggcatggctgaatcactcccccatcacaaactgttcggcgaaacgcacgtcaccttcgaccaggtcgtgcatgtcgttgatgtcgctgcgcagcaggagcgtgcgctccatgccgacgccgaaggcgaaaccggtgtagacgtccgggtcgatgccggcggacttcagcacgttcgggttcaccatgccgcagccgccccactcgagccagccggggccgcccttcttgtcggggaaccacaggtcgagttcggcgctcggttcagtgaacgggaagtagctcgggcgcaggcgcgtcttggcttcagggccgaacatggcgacggcgagcttgtccagcacgcccttcaggtcggccatggtcaggtgcttgtcgacggcgagggcttcgcactggtggaacaccggagtatgggtggcgtccagctcatcggtgcggaacacgcggcccggggacgcgatgtacagcggcacgccacgggtcaggagggcacggacctgatcggaggaggtctgcgtacgcaccaccatgttggagccgacgaaaccagcggcgtccttggcctgattgcccttgacgtagaaggtgtcctgcatctggcgggccggatggtccgggccgaagttcagggagtcgaagttgtaccattcggcttcgatttccggaccggaggagatctgccagcccatggagatgaagaagtcctcgacgtcctccatcagcttgggcagcgggtgacgggcgcccagaggcttgcggttcaccggcagcgtcatgtccacggtttcagcggcgagtgcggccttctcggcggcttccttgagctcgacctctttggggccataggcacggccgaagtcggcgcgcagcttgcccatgagcttgccggcttccttcttctggtcgacgggcagggagccaatggccttgctggccttggtcatcgccgaatcggcacctgcgtacgttgtcttgatggccttgagctcctccaggttggaggcgttctggattttctcgatgcccttggcaacctcagcggtcacctggtcggcgtcgaacaccatttgttctgccacgagaaccctttcgtctgatgttttctcagcgtttcacagcgtttttaccggtttcacattctttcaacatgacccgacatagacagcgacatcaacatcaccgcggccgaggtgccaaggttcagcgattcggccttgccgtacagcgggatggagacgatgcggccgcagcgtgtgaggatgtccggttccaagccacgcgcctcattgccgaacagcacggctttcggagcctcgaccgccgccttgtccgccagtactgcgggcaggctttccggcttgcattcttcggtgccgtatacgtcggcggcccagacgcccatattatggtcgcctgtccaggtgaagaattcgtcggtgctcatggcgagtaccggcagatggaacagggagcctgcggtggagcggatgaccttggggttcagcacgtccacgcagtcgtccacgaagattacggcgtcgcagccggccgcatcggccgcacggatcacggtgccggcgttgcccgggtcgcgcacctgccagaaggcggcgatctgcgggccccggccgttcttgccaagttcgacgtcatcggcaccggcgtgcatggactcggcattgccgacggccacgatgccctgggcgtccggactgatgcggtgcatcacgtcgccggtgcagtagtgcacataaatcgtggcatcctgcgaggtttcgacgatcttctccaacgtggaggagatgatacgcggatgttccaacgcctgcgaaacctccacatagaggtcctgcaccacgtccggccgccaagtgacggcctcgcgcacggattgcgggccttcgataagaaaacggcccgaacgttcgcggcctttggcgcgggtcagatcggcgatgcggcgaacgcggtcggatttcggattatcaagaatctgggcgttgatgggcatagccactaccctactgccgggtcattacgtcagtcgtggctcgctcccgctggcggaggcatcgtaagcctttcagacaccttgaaaggcactgtgccagtctgtcgcctttcagacaccttgaaaggcgaagtgccaattcccggtgccgacggctacgcctatggaggccagcgggacggccagacagatgacgtagaagatccagtcgataggcttcagacgcgagatgcgggcttgggaacgtggggcgccggagccgaagccgcgcgcttccatggcggtggcaagtttggtggcacgccggatggagagcaccagcagtccgaacgcttgggagagggcacgggcgatggcgttaccgtcaccaaggccgcgcgaacgctgggacaagccgagtgcgcgccaatcttcctgcagcagcgtaaacatgcgcaatccggccaatccgccgtatacgaatcgcggtgagaagtgcagaatctcaaccagaccgtccgccaaatcagtgggatcgaggcccaaggccagaatcacgccgggtacggcaatggccgccaccctgatagccgtggcgatggccagattgatggatccctcgctgatcacaatccagccaccctgccacaggatctcgcccgaggtgcggccgtagaggaacacggagataaaactgccggcggcggcgatccataccggccaggtcttacggcatacggtccacggagccacgccaccaatccacagcagcacgaattcgatgccgagcgccgtggatgcggataccgcatccagactgatgaacatcggaatgcacagcaacagcgcaccgatgatgcgactgaccgcgttgatgcgcgcgatgaaccatgagggcgatgaggctttgaccggctccacgcgcgtttcctgcgggctgacggttaccacgtcactcatgccttcgcctcctcgaacatcacacgtcgtgcgcccagcgcatccaccagcgcctcatcgtgcgtcaccatgatcacgcacgagccttggtcgcggatggcggcgatcagcttgaccatttcattccacgtactgaaatcctgtccgaatgtcggctcgtccatcaccaacactttgggtgcggcggccagcatggaggccacggacagtcgccgcttctccccgccagacaaggtgtacgggttggctttggcgaagcgcgtgagattcatctgctcaagcatgcggtcggcggtctgataagcctcgtcttggctctgccccatcgacttggggccgatggatacctcgtcacgcacaaagttggcagcgaactggtgttcgggctcctggaacaccatgccgatacggcccagcagttccttgcttttccagtcgatcggctcacgcccggcatgcgcgggcttgaggttgtcggcgatgagcaccttgccggcgataggcttgagtagcccggccaaggtcaaggccaaggtcgatttgcccgcgccgttcggacccatcagagccgttacttcgccgggataaaaatccagattgataccaacgccaagagcggccccacggccaaagcttaagttctcggtgctgagcaccggcgcatcgtgcgcagactcctgcttcggtgagtaatcgggaatcgcacggcccggcacccacgcgccaccggcggccaacacgtcgcccatctcggcgaacacctcgtccggcttgccgtcggcaatgaccgcacccgtgggcgaacttgcatcgggtcggccgagcacaatcacgcgatcgaccagatcgagccatacatcgatatgatgttcgaccacaaccatggtctgtccggtggcctcgatgacctttttgaccgcgtcatgcacttcgaccacgccttcgggatcgaggttggcggtcggttcgtccaacaacagcagaccgggcttcatagccagcacgccggccaacgcgagacgttgacgctgaccgccggacagatggcgggtggaccgatccagttcgagtccgccgagtcccaccatatccaatgattcgcgcactcgctgccaaatctcctcgcgcggcacgttgaggttttcgcagccgaaggccgcgtcatcgcccagtcgttcaagaatgatctgcgagtccgggtcctgaagcaccagtcccacgcgacctcgcgcctcgcgcgcatcgacgccatcgatggtgagcgagccctcctgctcgccttcctcatcgccgccaagtacgcctgcgagaccggccatcatcgtgcttttgcccgcgcccgaagcaccgagcagcaacacacgttcacctggccggatggtgaaatcgacggcacgcaacgcgaagtccttacgcgtggcgtgccgccatccccagccgctggcctctaccgcagccggattaatctgcatcagacgcgcgccttgctgcggccggattcaaaacgctccagagcaccggtgacggcgagcgcacgagacaagtaccagaccaccacgccggcgatcacgacgccggagatgatggagcccaccagataccaagtgacgcgcaggccgttccagcccgggttggtggcccagtagtaggcccagcagcccacgccggcgagcgcaccggacaggatggtggtgccgatgttccacttcttccaagcgaagacggcgaaggcaatttcggcacccagaccctggatgatgccgacgatcagcgagccgccgacgccccactggttgcccagcgtaagctcaaggaaggcggcgagggtttcggcaaacagtgcggcaccgggcttgcgcacaatgattgcagcgagcgggccggcgaacagccagaatccgttgagcagaccctcgaaaccgggggtcacgccttcaaacagggccagcggggcggagcagacaatgtcccagccccagaaaatgacgccggatgcgacggcgatgattgcggcgacgacgatatcgacgacgcgccacttgtaattggctttggccacagcttcagtcatgaatgtgcctttcttctgctcgcacgcaggccgaacatacgtggatatatgtacgcacatgatgcatatgttcgtggccacgcgcgggttggttcaggcacgggtaggtaagagcgacatttccgtgcgccggcattatccggtcacgttccatcggtcgagactatgagtctcctctcagccgcccaacggcagctcccgtgtcaactcccgactataaagcaagccgccgtcaaaggcaatagccacatctgtgacctacctgacggcggctcactaccattaccgatgcggttcggctacttgccgagcttgtccagcagcaaagcctcggtgatcacgttgttcttgaggccgggcagggagatggactcattggggctgtgggcgttggccttcgggtcttcgggaccggtgaccagcacctgagcgttggggaaaatgcgctgcagttcggggatgaacggaatggagccgccttcgcccttgttgatgggctcaacgccgaaggcctcggtcatggcttccagcgcgtccttggtggccacggcggtcgggtccatggcccagcccatgccgttttcgccgcgttcgacagtgaccttggcaccgaacggcgcgtgggattcgaggaatgcagccagtgcttcctgcgcttcttcagggcgctgggtgggcgcggtgcgcagcgacagacggaagcgggtctccggggcgatcacgttgaaggatccctcgaccgggtgggcgtcgaagccgatcacggtcacggacggcttggtccacaggcgtgaggccagtgaaccggtgccggcgaactcgtaaccggccaccacgccagaatccttgcgcacggtggtttcgtcaaggtcgtgctgcaaaccgccgatcggctcttccgcggccacgccgggtacggccagatcgccgttctcgtcatacatggaagcgatgagcatggcggccaacgtattggagtcgagaatcgggccgccgtactggccggagtgcaccggatgctcaaggccctgcacggtcacgtccacacaggtgttgccgcgcagcgaggtggtcaaagaaggaatgtccgccgaccagttgccggaatcggccacgataatcacgtcagcggcgaattcgtcgcggtgagcctcgatgaagggaatgaagcttggcgagcccatctcctcttcgccttcgatgaacactttgatattgacgttgaggtcgtcgcccagggccttcagtgcaccggaatggatggcgataccgccgccgtcatcggcggagccacggccgtagaggcggccgtcaatttcggtggccacgaacgggtcggtgttccactcggccgggtccggaacaggctgcacgtcgtgatgggcgtagagcagcacggtgagggcgtccggagaaacgatatgcgagccgatgacctcccatgcgcccggagtgccgtcggcattggaagcctgaaccaccttggtatccacatccacgaggcgcagttcgtctgccacgaattcagcggagcgcttcatttgttcggcggtgatgcccttggcggagatcgactgcagcgcgaccttttcggccagtaccttgacgatgcggttccaatcggtttcgacgcgcgaacgaatctcgtcagcggtgagcgttgtcatgatggtcctcctttatatatatgtgtgagcggcgtcattgcaatggctgcgccagtgtacaagtgtctgaacgtcaccgtaacctcaaagcatgacatggaatccgtttaagaaaaaagaagaggtccaggctcctgttgagcaggccccgaagaaggccgccaatccttctgagaaaaaaggccgtcctaccccgaagatgaagcaggctcaggccgccggtatccgtccgctggttccggtggaccgcagggccagcgccaaggccgccaaagcccgtctgcgtgagaaggagaacgccgagtacgaggcgatgcagaatggcgatatcaaccacatgcccaaggcggaacgcttgccttggcgtatctacatccgtgattatgtggatgcccgtttcaaccttggtgaatggttcatcccagtggccttcgcgattctgatcgtttccatgttcgtcacttctttgatgcagaaccagtgggcttccatcatcatgatggcgcttatgtacggttacctgattgccgtgatcatcgacgtatggctgatgtggcgcaagctcaaggccaagctcatcgccaagtacggcgaacggtccgtgtccaagggctcccgctccttctcctacgcttggagccgttcgattcagatgcgtcgttggaggcttcccaagccgcgttacccgaagcgcggtcactggccggcggactgattgtccatatatactctggctcccctcgttgaggggctgagccgtaaagaaaacagtccagtggactgtttttaggcgaagtggcggcgatagccgcatatggctccctagcgtgggagccatacttatatgtatcaaggaggcaatcatgagcgaacagtttgatctggtcatcatcggggccggccccggcggctattccacggccctgcgcgccgccgaactcggcatgaaagtggcactcgtcgagcgtgacgccaccgtaggcggcacatgtctcaaccgtggctgcatcccctccaaggcgctcatcaccgccacccacaccatcgacaccgtgcaccgtgcggccgagctcggcgtcaacgcctcggtgaatggcatcgacttcggcacgctgcgcgactatcgcctgcgcgtggtcaagacgatggtgggaggactggccggactgcttgcccatcgcggcatcaccgtgttccgagccaatgccgcgttccatgcggatgagaccgctccagcaacttccaaccacatcgtccacctcgtcccttcccccgaccaaagcgacatcctcacctatcacaaggccgatgtccccgagcccagcggccccacgatggacctcacggccacgaacatcgtcatcgccaccggtgccaagccacgcccattgcccggcaacccgttcgccggcgccctcatcgactccacacaggcgctggaagtcaacgaatttccctcgtcggcggtgattatcggcgccggggccatcgcccttgaattcgcctcgatgtggaacgccgccggttcgaaggtgaccttgctgattcgcaaggaccgtgtgctctcagcctgggaccggagagccggcaccacgctgacccgtgagctcaaacgtcatggcgtgaacatcatcacccgcgccagcgtcacccatgtggacaccggcgcgaaccttggtgccaccgtgcactacacgtgcgaaggccaggacggcgaacaaagcgtctggggcgaaatcgcccttgtcgccatcgggcgtgacccgatcaccgacccagcatggggcgtgacgattgacgaccacggacatgtcgccacggatgcgtacggccgcaccgacaaaccgggcgtatgggcggtgggcgacgtgacggccggtcacgcgctggcgcatcgtgcttttgagcaaggcatcgtcatcgcggagaccatcgccggactcaatcccaagccggtggacgaagccaccgtgccgcagatcgtgttctccttccccgaagcggcgtcggtcgggctcaccgtcgaacaggcgcaggcgagagaggatctcattgaaatcaaggagaccaactatccgatgctggcgaacgcgcgcatgctgatgagcggcacggccggttcactgaccatcgtctccggctgcgacgcgaccaacccggacaccccgcgcgtgctcggcgtgcacatggtctcccagatggcctccgacatcatcgccgaagccgaacagctggtcggcaaccgtgtgccgctcgccgacgcagcccgcctcgttcacccgcatcccacgttcagtgaaacgctcggcgaggcgctgctcaaggccgacggacggccgttgcacacacgctgagaccaaccagcacaagcaagttcggaccagcgcacctgataagatgttgtttagtgtgtttcgtcccaacaaaggaagaagtgatggcggaaaaggacgcgaagccgaagaagcagagcacaatcaagcagatcatccagatctacaagtacacggctaaggaagacaaggccctgccgtggcttgaggccggtgctttcctgctgcctgtagtcgtgatgatcatcatcggtctgattgccaagtggacctggctgacctggatcttcaccatgatcaccgccatcatgctcggcattctgctggccaccatgatgctcacccgccgcgcggatgcagtcggctacaagcagattgatggcaagcctggtgccgccatcggcgtgctgagcaacatgcagaaagccggctttgacttcccgcaggaaccggtgtggatcgacccgaagaccaaggatgccatctggcgcggcacttcgatgaacggcatctacctgatcggcgaaggcgaatacggtcgcgtcatgaaggcgatggatcgtcaggaacacgatatcaagggcgtcaccgccggctcctccattccggtgtaccgcatctccgtgggccacggccccaagcaggtgccactggacaagctgcgtagcacggtgaccaagtccaagagctatgagcccacgaaccacaagaacgcactgatcgccaagattcatccgcgtcgtcgcttcctgctgaccaaggccgagatggaaacgctgaacgatcgtctgcgcacgctgcaggccaagaagggctatgccatccccaagggcatggacccgaaccacccgcagaagatctcccgccgcgcgatgcgcggtcgctgatcggcagcacaccaccaaatcgcacagaagccccggaatccgttaatcggttccggggcttcgtcatatgtctcataatcgcgtccacatacatccacctacgtcacctgtcaatatccactgtccacgttgcggacacctctacccactcccccgatagcctccgtttccattctgtaatgatgtttcgttgaaataacgcgcctgcgcgattgtcggccacagtcacgaaacattctcgtaacccaagtttcgagccggcgaaacgcacgattttacgatggataccgttatatttcatacgaaaggagcggtcccgtgaccgaactcaagtccaaggaagacgccgaggcccttatcaacaaggaaggcatcgagtatgtctccgtccgtttcaccgatcttatcggcgttcagcagcacttcaccgtgccggctagcgaattcctgaaggacgctttcaccgacggcatgccgttcgatggttcctccgttcagggcttccaggccatcaacgagtccgacatgaagctggtcccggacgttgagaccgctttcgttgacccgttccgcaagcacaagacccttgacgtggccttctccatcgtcgacccgctgaccgacgagccgtactcccgtgacccgcgtcaggttgccggcaaggccgaggcctacctgaagtccaccggtatcgccgacaccgcctccttcgctcctgaggccgagttcttcatcttcgacaaggtgcgtttcgagaactccatgcagcgctccttctacgaggtcgactccatcgaagctccgtggaactccggcgttgacgttgaggaagacggcaccccgaacatcggtttcaagaaccgcgtcaagaagggctacttcccggttccgccgattgaccacacccaggatctgcgcgacgatatggtcgccaacctgcagaaggtcggcctgatcctcgagcgttcccaccacgaggtcgccggcgctggccagcaggagatcaactaccgcttcaacaccctgcagcacgcaggcgatgacctgatgaagtacaagtacgtcgtccacgagaccgccgctctggccggcaaggctgcgaccttcatgccgaagccgatcgccgacgacaacggcactggtatgcactgccaccagtccctgtggaaggacggcaagccgctgttctacgacgagaagggctacgctggtctgtccgatctggctcgctggtacatcggcggtctgatcaagcactcctcctccgtgctggccttcaccaacccgtccctgaactcctaccaccgtctggtcccgggcttcgaggctccggtcaacctggtgtactccgctcgtaaccgttctgccgccatccgtattccgctggccggcacctccccggccgccaagcgcatcgagttccgcgctccggatccgtcctgcaacccgttcctggccttctccgctcagctgatggctggcctggacggcatcctgaaccacatcgagcctccggagccggtcgacaaggatctctacgagctgccgccggaagagcacgctggcatcaagcaggtgccaagctccctggccgaggctatggacgccctggaagaggaccacgacttcctcaccgccggcgacgtgttcaccgacgacctgatcgagacctggattggcctcaagcgcgacgagatcgaccaggctcgcctggccccgaccccgctcgagtacgagctctacttccacatctgagtttgagagcttagccacgttggaattcccattgctcttccctcgtgggagtctaatgggagtcattcagcgtaactagaaagaacctcgtgaaattcgtttcacgaggttctttttcgtatgttgcgttgtatgttatgcgatgtgtgttgctcctggaatattccaggggcgggccgctacttagtctcccaacgctccttgagtacataggcggcggctttgggctgacggtcgcgagtgaagacgtccttcttgttgccgtcgacgcgcatgataccttcaccggtttggaagtcgcagaggttccatacctgctcgcccaccactgcctcgaacatgtcgaacacttcgtgctgcatggtgaggtactcgcattggtactcttcactccattgcatgctcggcagcttgtgcacaccggcatcggtgtccgcaccgtattcggtgaacagaaacggcttgttgggttcggtgttcatccattggttcatctcgttgatgaaggccttcttggctccgatgagctgatacccatcttgcacataccagccgtaataccggttcaggcagatgacatccgcgaactgatggcacttgtctttgcctccggcggccatcagcagattggtgtaggtcagcgggcgatgctgcggatcgagcgtgcgcgcgtaatcgaatatctccttgaaatacggcacggccgcctcggattggagtcgttggcggcgtcgatgaaattccaagcgccggaggccccggcattcttttcgtcgaaggggacaattcagaacacaactgccgacacaatcgtcagggaggccagcgagaacagcgtgcttacgagcacgaagccgaccgcatactcgggcatgttgttcttgcgaccggtgaacatggcgatggtggtcatggtcggcagtccggcgatgaccgtgatcatcagcaccatgtcatgggtgatcggcagttgcggcaatgcgccggtcagcgcggtcagtagcgcgtagaaggcgagcgggaatgcgatcatcttggcgactaggccagcatagagttcgtagcgtttgaggacgccccaccacttggtcagcgcgaacaggccgcccaagtagattagcgacatcggcgtggccatattgccgatggtgtgcagcggcttcaggatgatgtccggcaccttgacgccgagcagaatcagaatcagggcgagcatcacgccgacgaaggcgggattgacgaatcgtttaagcaggccgaggacgcgggtgcctggcgaggggcggacgacggccggagaaccaccgtttgcggcattgctcgccgaaccagcattgcccaccgaaccggcgccgttcaccgaaccgttcacgaccgcacctcgcgcgccaatcgcgttgccgccagtcgtttcgtcgaccggctcgcacagccatacgccgtacgtccagagcagcgtctggtcgatgatcgacatcagcgccacgtaaatcgcgccgttctgcggccaaagtgccataatcaacggaatgccgatgaatccggcgttgccgaaaataagcgacgcctgaaatacatggctacgcgaacctttgagccgcaacagttcggcgaccagccagaacaccaggatgagcagcgcgtacatcacggcggtcagcagcatcacgccccagttagaggcaagctgcgcgcggtccgcaccatcgacggcgttcgaaaacacaagcacggggatgagcacgttgagcagcaacgagcacatgccgtccaacgccgtctgaccgtagaatcgaagcctcacacatccatacccgaccatcagcatgatcagaaatccgactaactggccaatcatgacgccgaactgccccatgcacactcctctcgctcgcgttcccgtgcttttctgtcactggttcatataggcagccatctggacaggctcggcggcacacgcatcagtatgttcgataccaccacatgccaatccacttctcgttcaaccgttccccgtgctaatgcgccgccggccaccccgtgttgccggtgctgcgcgagcaccattacacgtattgcattccggtgatcagcgggcgcaacgtgtgggtcggcgcgaacgtgtcgattctgccgggagtgaccatcggcgacaattgcgtgattggcgccggttcggtcgtgacacattccatccccgccaactccgtcacctacggcgcgccctgcgaggtcgtgcgtgaaatcggcgacaaggaccgcgagtatttctacaaaaatcgcaagctcgacgtgtgggagtgagctttcgcgctactgctctttgagcttaaaacgctcactgaattggcggtcgcgccagtagtagacgtcgtcgcgttcgttgatttcgcgaattaccttgcacgggctgccataggcgaccgtgttggcggggatgtccttggtgaccagcgagttggcgccaatgaccgcgttgtccccgatggtgcccccgggcagcacggtgacattcgcgccgatccagacgttctcgccgatgtggactggcaacgaatactgggcaccctgatagcgcaggtccggacgcacgggatggccggtggctacaagcgtgacgttggggccgatcatggtgtgggatccgatgaagatctcaccatcgtccaccagcgtcaggttgaagttggcgtaacagcgctcgccccaataagtattgcagccccagttcgcatacaccgggcattcgaggtacagaccctcccccgccgcgccgaagaacgcctgcatgagttcggtacggcgcttcgggttggtcagcggcgtggcgttgagttcgagctggagatcacgctgggcggcctgcagatcaaaaaagccgtccacatcatccggcaggtagacctcgccagagaacataagcgccattttctcgcgcgtcgcatcatcgataatcggcttggcgatcggcttgtcttcggtcatcattggctcctgttcggcgttttggcgattgcgtcggtcgaactattctgtcacagactcgttttcgacacccagcatcgagcgcagccagtcaagttcggcggcaatctcggcgtcatgcacggcgatgatgccacggcgataggggtcgtcgatctgctcggtggagagcggattgccggcgtcacaggcatcaccgtcaaggctggcgccaccgtgcaggtcatcgaccgcaacccggacaaggccgcagcagcagcagctgaaggcgtcaccaatcagaccccatggaccagcggttttaaggttgtcaagtaagcggcatatcgcagcgaatcattctcaataagaaaagtgtgaggcaaacgcacaatatcactcaatcgcgcattcgcgggaatagcatcaaacagccatttcttggattcagatgtgcgattggcaccgtgcgggcctcacacttttcttattgagaacgattcgccgtgcagtcaagccctccatccacccaaaaaggactcgcttttggccgcgtcgtcgcggtaggccttgccgaactcgtcaataagcccatggaattcctgcaaatccttgacgctgaggctcgcatccagcaccacgggcgaataggccttgtggaatgccagatagccggttggcacatcaaatccaaggaaggcgaatagtcggcgagcataagtatcggccacgaatgtgcggcgcgaaaacacatatagcatcaggtcgtcggccgtttcgcccccgataccgaataatccgagcaattcggtccgcaattcggcgtcgggaatatctgccgcgccctcaggcgaggctccgcaacgctccacataccatcggctcagtgactgtaccgtcttggatttgttgacataaaagccggacgggcgaataagttcctgcagatgcgctggccccataatcgccagcttatggggttcgagcacaccctccgcgttcaacgccgcaagcgaacgattcacattgccccacgccgtattctgcgtcagcaccgcgcccaccataatctcgaatgtggtttcagccggccaccatccggtcgggccaagggcggcagccatggtgcggtacagcgattcgatatacgcgggagaaggaacgcccggcacccgctttgcacttcgattattcatagttgccatctaccattcaccgcaattcatgcaggattcgccgcatgaacgggatagtgactaggaatgtcagcacgtcggacaccgattgcgccatttccacgccgagcacgccgaacatcatcggcagaatcagtacgatcggtgccaaaaacagaccttgtcggcacagggccaggaatgaggcgatgccggtgcggcccatggtctgggtcatcatattgcccatcatgttgaagccgttgagaatcaccgtgcagcattggatgtgcagcgcggccacgcccaccgccaccacggccgggtcggagcggaagatctcgaccagttgcggtgcgaacacccacagcaacaccgccaacaccacgagcacgcaggtggcgagccgcacgcagaaccagtacccttctttgacgcgcgcgaacaggccggcaccgtagttgtagccgcacaccggttggaaaccttggccgaggccgacgatcaccgagttggcgcccaacataatgcgcatcacaatggccatgccggcgatggccgcatcgccgaacggattggcggcaatgttcacgcaggtcacggaaatcgaaccggcgccttggcggatcagcgagggcaggccaccgccggccacttcgcgcatgagcagcacatccggcctgcaattgcgcagggacagtttcatcacgccgaatttgcggctcattgtggtcagaatcgtgaagctcaccgtctggcagatggcggtggccaggccggcaccaaaaattccgaggtgcagcacgaagataaacaacggcgcgagcaggaaattcagcaatgcgcccgaaaccagcccgatcatgccgaacgtcgattgcccttggtatcgcagcagtccgttgagtgcgaacgaaccgcatacacagggtgcggcgaccaacaacggcgtcaggtattgcacggcgtatggggcgattgtcgaggtcgatcccagcatgacgaccagcggccgcagggtcagcaatccgattgtggcaatcaccaaaccagagagcaccgcacccgcgaagcccacggccagtagtcgggaggcgcgctcattgttctgtttgccgagttcgcggctcatcgagttgcccgcgccgttgccaaagaagaagccgagcgcctgcatcacggtcatgatggagaacgcgatgccgatggcaccggactgcgcggtgccgagctgaccaataaagaacgtgtccgtgagattgtaggcggtggtcaccaagttggagatgacggccggcaaacacagtttgagaatcagcggcttgaccggctgcccggtcatctgccgatatttcgcgtccgcgcttgcgcgtctaatgccatgaatctgcaccatggacggctatcctactcgcgcagggtcctatgcaaaggcgcgttaccgccatacgagtcagcgcagataccgcccggtgatgctgttcggattggccgcgatttgttccggcgttccggtggcgacgatgcgtccgccgctttcgccaccgcccggacccatgtcgatgatccagtccgcattggcgatcacgtcaaggtcatgttcgatgaccacgactgttgcgccgctcgccacgagccggtcgaacacgcccagcagcacgcgcacgtcgaacgggtgcagaccgatggtcggctcatcgaacacgaataccgcgtccgattgggccttgcccatttcactggcgagtttcagccgctgggcttcgccgcccgaaagcgccggcgtcggttcgccgagcgtcaagtagccgaggcccaagtcgtgcagggtggtcagacgtgcgtgaaccttcttgaggtcgccggtcacggacagcgcctggtccacgctcattgccatgagttgaggcaggctcagggaaatgttgccgccaccctgatccgtcgcctcactcaatttttccttggcagctttgcgtttatccgggaccttcatcttcgccgctttgcccttagccgctttaaccgcacgccgaatcgcgtcggcttcggacgcatagcgggagcctccacaatccgggcattcgatggtcacgtccggcaggaactgcacatcgagcgagattgaaccggtgccgtcgcatgtggggcaacgcagtcggccggtgttgtatgagaaatcgccagccttccagccgcccgccttggcgccgtccgtgcgggcgaaggcgcggcgcaattcgtcgtgaatatcggcataggtggccacggtggagcgtacgtttgcgccaatcggcgtggcgtcgatgagattcgcacgatggatgccctcggcctcaagttcacgcacatgttccggcaaccgctcccccgccgcctgcgctttgagcgcaggaatcagcgattcgagcaccatcgtggttttaccggagccggagacgcctgtcaccgccacgagccggccgcgcggaatatcaacgtccagcggcttgaccgtatgcaactggctggttgtcatgcggatgcggccaaggtcgaacacctgcggttccgccacgcgctcacggatgcgcgcgctcacattatcggccaagaacggcgcaatacgactacttggattcgccgccacctcgccgaccgtcccttgcgcgatcacatgccctccttcggcgccggcaaccggtcccatttcgataagatggtcggcggccttgagcacgcgcacgtcatggtccacgaccaccacggaattgccgtccgccaccaagtcatgcatcacgccgagcagcccatccacgttcgaggggtgcaggccaatggacggctcgtcgagcacatacagcacgccggtggtgcggttgcgcacggcacgggcgagctgcacacgctggcgttcaccggttgaaagcgtggcaccggcgcggtcaagcgccagatagccgaggcccagatccaacagtcggcgggccacgtccaggaatgattcgcagatgttggtggccatcggccgcatgtcggcggacagagattccggcacgccgcgcacccaatccaccgccgcatccaaggtcatcgcgctggcttcggccaggttcagcccgcgcacatgcggggcccgggctgcggcgctcagtcgtgtgccgccacagtcggcgcatggtccctccttgagaaatcgagccacgcgcttcagacctttctcgtccttggctttggcgagcgcgttctccaccgtgtatacggcgttgaagtaggtgaaatcgagttcggcgaaatcgtcgcctttcttcggcttgtaaagaatatgctttttgacggccggcccgttgaatacgatgtcacgctcttcgggcgtgagctcgctgaacggcacgttggtgcgcacgcccatcgcgccgcacacctgcttcataaggtcccacatgagcgagccccatggcagcaccgcaccgtcgtcgatacttttcgactcatccggcaccagggccgcacggttcacttcgcgcacaatgccggttccggagcaggtcgggcaggcgccggccgagttgaaagcgagcgattcggcgccgggcgcgtggaattccttgccacagccagcacaggtgatgggcagtccggccgccacgttcagcgtcgactcgttgcgcgccccgcaatgcgggcacacgtgcgaggcaacgcgggagaacaggagccgcagactgttgagcagttcggtcatcgtgccgaacgtcgaacggatgccaggcaccgtgggccgctggtgcagggccagcgcggccggcacgtgcagtacttcgtccacttgggcgcgactggcctgggtcaggcggcgtcgcgtgtacgtggacagcgcctccaagtagcgccgcgaaccttccgcatacagcacgccgagcgccagcgagctctttcccgaaccggagacgccggccacgcccaccagttcgcccagcggaatgtcgatgtcgatgttcttcaggttatgcacgcgcgccccgcgcacttcgatcgcctgcggccgttgattgttggtcatgctcggcaccgctccgccgccgcgctatctgacctctgttcaagtgtcacgccgtcacctctttctcgacttcgcccttggctgccgccgcctgagcttcatggtctccagtatcatcacggccaacgacggcggccgaacgacggacgagaatctttcgtcttgggcaccgtccgccacctgcaattcgaactagctgaaccagcgtgacgatattgtcggctatcgatctgccgtgatcgtaatggacatcgtcgtccggaagcacgtcacctgttccgagaggagtcggcggcgcgctttcataagggcacacaatcccaagatcacacccacagatcaataccgatcaatactcgtacgtgatcgcggggtcgccgatggtcggcgtctgatccagtttgaggttggccgagccggccgcggtggtcacgtcgtattcgatggtcaccgtgtcctgaggcgccagggagatgtcgtccatgtaggtcatatggtccttggcctgcacctgtgcgaaggaactgccgttcgacgccgacacgttgctgacctcgcctccggccggcgtgtagatgaccacgcggttcaccgccacgcctcccttggcgttcgccgtgatgtattccggcagggatccggcctcgcccggctgcagggtgttggtgaacgaatacgtaacgtggtaggtgttgtcgccggtcctcttcaccgtcgacttgcgctggatgtaccagtccatcttcgaggcctgcatctcgttggagtagacgccggtcaccgggttcttcgcgtcgttggtgatctcgccggtgacgccggcgctgcgcagcaccgcctgatcctcctcgtggaacgaccagaagtacaggtgccgctgctcggccatccggagcatcgtcttggcgacggtcatgagcttctgcgtgttcatgtcgctgaacaggtgggcgaccgcctgggcggcggtctcgctgaagtactggtcctgagcggagggcgtcagttccttgtaggcgccgttgagcaggaattcggcggtgttcgacccgttgagcacgcgcccgtcggacagagtcacgtcgccggtggcgccgatcatcgcctgcagcgcgacggggtcgagcgacatcacgccgtcggacgatccgccgaacggagccgcctgccagaacttctgggccatggacgcgacgcgcgggaagtccggcgtggacgaaagattatgaatgacttgaccgaagtacagtccgctgtacagcgtgccgtcaccgtcctggttgacgtcatccaacgcggcgttggaggggaactcggcatccgcgtggaactcccccaccgcgatcttgccgttgtccgcgctgaaggaaccggccgaaccgatcaggccgccggttccgcggatctcggaattcgtctgggcaagcagcacgtagttgcgggcgccgttcgcaccgaggaagttcggcagcatgttgagcatgccgctcaggttttcggtcacctgcgccagggcggccatctgcgtcttgccgttctgcagcgcgttgttcaccacgccgagtttggcgtcgggaagatcctggatcgtcctggcctgtgattgcacggactggtcgaccgtggcaagctgctgcgccgcagcgatgatcggctccatgttgagctgcccatcgccactggagaggctggcaccggtcagtgtggtgacgaccttgcccagctggggcagcgtggtctgcgcgaagtcatcgatggtaccgatggcggtgcgcgccgtcttcacgtcaccgccgaccacgggcatcttctccgccagcgtccacagaccgccgctgacatcctgcttggcggcggccgcctccttctggatgtagctcacgtcggacagcgccttgaccatgtcgtcggtggaaccgtccttgatgaccttggccgcgttaacgacattgttgaggtgcgctttggcgctcatcgccgacttgtacagtttgaatccgctgaagccggccgccgcggcgcacacgaccagcaacagcagtacgacgagcagcgcgttgcgaacgcgatgggttgtcctggtgaccgtgcgtgcgtgtgatggcatgggctacttccttacgttatgacatgtatcgatactggctagctgcccggttacgctttcgctggacgggtagcccggcggacggcacgtagcagtgcacgacgtgcacatcgcgtatgatgccgggggttgtcagcgcggctgactggggtggccgcggaccggtacctggacttgcagctgccctccggcgatgcgtgtcacctgcagcggggaacgtccgctgcagttacggctattaccggccagccgacagcaatcgctggtttagttgttggtcttttccggctggtcacccgttcccatgagctggcatgcacctttcagcgagtatctctcctaccgcatgccagtctacccatgcccgcgggataacccaaaaagccttgcaagaataccgaatttctttacctttggccctgatcgttcgacggctctcaagacggcgtaacctcatccaaccggccgatccccggaggcggaaccagcggaatcctcgtgaccgggaatgcgatcgttcccgcttgcgcgatggcggatgcgcgcaacgccaacgacgcatcgacaagccactgtatggcactctcaaaatccttgccacgtccaccagctcacaccacgccgtatacgaacttcttgttctctttcgccaactgggaaggaattgaatcccatacctgattgagacgaagcgtggtgacggcgggactatcacgcatatcaacatgtttggagaaatcgtcacgataatcggagaccagactattctgcaatttacgaaccgccgtgaagtcaggattcggcagagtactggcgaacgcttcaacgatctccggcatgcctcctgtatacatgaaataccgcagccaagtcatgaccctgtcatgcattacgttaattagcggagaatccttggactcaagcatttcggccaaggcatactgtttgcacgcatacaggaattcaacaaaagacataggatacagcttgagtctactgaccttgccaaccgggaatgaaaacccaggatgcatggcgatgccaagcgccgatccagtggccaagacgtcatactccggggcagcttcattgaacatcttcagcgaagtcatcgccctcggcacctcctgtacctcatcgaaaatgacgagcgtatcctcgggagtgatcctagttccggactcgatcgacagtgcgggaatcagccgttccacactcagatccgcatcaaacaacatacgcatgttggcattgtcgaaaaatgcgacacaacagcaatacgtaaggtacttgacaatctttgctggagtcgtatactcatatctgtcaggtacttgacataattactgaagaggatgaaaaagacacacgaccagcgacgcttcgctcgcttccttattaaaggagaccggcatgaacatcacacatgacatgagcaacgacctcaccgaatacgacccggaatcccgtcaagtagacggaccgaaccccatcgaaaaccgcatcagctcctccgcggcccgtgttcccgacatcatcagctgcacttccggcatcaccgtccagggccgccaactccactcgttcgcgttcaccacggacgcggccatcatccgcaacaccaatgccgacgccattctcgccgtatatccgttcaccggcgaaccagtcatcacccaggccctactcaccgcggcccaggccccgctgttcgtcggcgtgggcggtggcaccaccaccggcccgcgcgtcatccaactcgccatgatggccgagatgcagggtgcggcgggcgtggtgctcaacgcgccggcgccgccctccacggtgtacgacgtggcgcgcatcacgaacaccccggtcatcgccacggtcctgacctgcgatgacgaattggacgagaaaatcgaggccggcgcctccatcatcaacgtggcggccggccgcaggacgcctgacgtggtccagcagatcaggcagcgtcacccctccatcccgctgctcgccagcggcggttcgaccgacgagtccatggccgaaaccatcgtggccggcgcgaacgcgctgacctggaccccgccgaacgcgcaggagatgcagcgctcgatgatgatgcgctatcgcggcgaatccaccggcgacaacatgcagcactgacgtaaggattccgaacatgagcagcaccagcaacaacgccgccgtaaccggaaacgacgcggtcgacgacgtaatggccacgagtcaatcggcggagaacggcacaagccacgacaccgccgacggcgatatcaagaacgatgttctcagcagtttcatcagcattggccgtatcatggcgtatcgcgcgatacacagacggctcgtctcccccggcgccaaatcgccgcgcggcgaacatgctttcgacccacgccgtggccaaggccgcgtcttggccacgctcagggaatccgaccagaccagccagaaggacttggccgcgatgttcggcatgagccgccaggccatggccgaactgttgaagaaactggaggccagcggtcacatcagccgccgtccatccaggcgggacagccgcgtcatgatggtcagcctcaccaaccagggccgcaaggccgccgatctgctgggcaaagcgcccgaccagacctcctccatgctggactgtctcaatgaaaccgagctacaaaccctacacggctacctgcagcgcatcatcgacacctcctccgacgacctaccggcctcgaccgccgaggatgtcaaaaagtgtgagctgcttatcgaacacctcaagcgcaggcgaatgccgaccgaccgcgcatagtttgcgaacagcccgcacgacttgtggccgcataagcatgcggccacacaacagtccagccgcacagtcatccagccgcccctacaaacacacccgattcaccatttgcacgacatcttgcaccaaaccctactttgaaatgcggtattttgcaccaaaaccccattttgaaatgcggcattctgcacatacaaggcagaaaatgctactcccataagggatattgattttcatcgacgaggtgcaagaggcaccggatgtaatgaccacgtcaagtttgatgtaccggcgtcgcaattcggcgatttgacgtttcaccacatctcgctgattgcgaaaaacagcaagtcgtgattcgagcgtggcatcaccttgcttagtcatatcaacaaaatccttgatctctgcgagactcatgcccgtggatttcagacattcaatgagatcaagcaattcaagatcgccgtcatcgaagcatctccgtccgaaaccagttcaagcgataccgggcaaaagaccttggccgtcatagtagcgcaacgtatgttcggacagcccagtctttcgcgacacctgaccgatggaatatcccatgccaactcctttccctgcagtcgagccagtgtgagtccagccatattcacggatgtcctatgcggaacggacactcttcgactgcctgaaccttgcagcccaaacatgcatcaatcagcacaaatcacagacagtgggccatatacaacggcagcttgatgcgttctccatccacttcgagttggcggggatgcagaacgtattccttgcccaatcgttgggcataccttttgcggaatttgtcgagcgaagacacaccgtatcgtttcgtggatttcacttcgatcgggctgatgcgaggcttcatcgcggcattatcgtattcccgaacgatgaggaagtctatttccatggttttcgaggcatccgccctatccaagcgcgagaagaaatacagtttgcgcccattcgcccggaattgctgagccaccgcattctccaccagcatcccttcgttgagcgagagtttatcgaacagaatatcccggtacacatcatccggcgttgtctctcgatcggcaaacgcctgcgacaccagcaaaccggtatccgccatatagcatttgaatgaatcgttatcttcgtacaatcccagccccaccaaagggtcagtcgaattacggcacaggttcaccaagcgggcgtcttccaaccagaagaacgccgaatcgtattcacgagatcgagcccccttatcgaccgatgccagagtgaatcgtttctcatgcttggacagctgccctggaatctgagcgaaaatgccccgcacgcggccggcatcgccattggcgaacttgccgatatcatcactgtacagctgcaggatgccacgcttgatcaaatccacctcgccaaaatcgcgctgctcgacataatcggcaaccgcctgcggcataccgcccaccagcagatattcgcgccacagcctcatcgctcgtttgtgcagcgcatcgggcaacgggaccagacgctcgaacgatttgcgaatcgtttcagcaagcagctcctcccccatggcccagcagaactcctcaaaatcgagcggccccatgtccattttccgttcctcggaggggatgacgatattcgccacattcctcttgatggagatcagcgaaccagtttccacatagtcataccggccatccgcaaccagatatttgatgagctccctcgccgccggataccgctgcacctcgtcgaaaataatcaacgattcacgctcgtacagtcgcttgcggtaatacgcagacaacagcatgaaaaatgtgtcaaagtcatcacgctggttttcgaagatgtcgcgaacatcgcgcggcaaacgtgtgaaatcgatgagaatatatgacttgtactgagtgcggccgaattcctcgacaatggtgcttttgcccacacggcgagcgccttcgatgagaagagcctcacgcccacccgctttttgtttccatgcgatcagcttatccagcatcttgcgcttcaacatgagcaatcacctcattacacgaaaacaacagtataggcatatgctattctacacgaaaacagaagtatagagatggccgattctacacgaaaacaacggtatggaaacatgcaccgaaccggctcacccccaatctctcccccatcacaccggcggcctgttcgattgtgcggttttgtgcgaatggctcacacggttcttagtgagaaccgttctctgcgcacctgaccctagaaccggatcagcgccttgatgaccttgcgctggtccatcgcctcgtaggcgtcctggatatggtcgaggtcgtactcggcggtgaacacgcggccggggttgatctcgcccttgagcaccgcgtccagcagaccctcatcaaggtcatagtggcgcacgggagccgggccgcccttgatgccgatgttgccgtagaacgtgccttcggcgctgatctccacgtcgtgcggcaggcccacacgaccaatcacgccaccgcggcgaatcaggccaatcgccgtgtcgaaggactgcttggagcccacgcattcgagaactgcgtccgcaccatagccgccggtcatctccagcaccttgtcaatagcctcttggccacgctcgggcacgatatcagtcgcaccgaattcgcgggcgagcgccgcgcgatcctcgtgacggctcatggcaataacgcgcgtggcaccgcgcatcttggcggcaatcacaccgcacaggccaactgcgccatcgcccatgaccacggcggtgtcaccgggcttgacctcggcagaaaccgccgcgtgataaccggtggacatcacatcggaaatggtcagcagcgatgcgagctgctcatcggaataatcttccggtgaaccgggcaccttgaccacggtgccgtccgcctcgggcacacgcaggtattcggcctgacaggcggagaagtagccgccgtgcgggcacacggattcgaagccggccttgcataccgggcacttgccgcagctgtatgggaatggcacaaccacgaaatcgccgggcttgacggattcgaccgccgcgccaacctcttcgaccacaccgatggactcgtgacccacctggctgtgtgcggcctgtccgctcagcccacggaagaaccacaaatcagagccgcacgcgcacgtgcgcaccacgcggatcacgatgtcatcatcctgttcaagcatcgccttcggcacttcttccacggtcatcttgccaggctccacgaaaatcgcagctttcatggtttcagacatacgttcataactccttgttttccggcatcgagcgcttaaggcccgttatcctcgtgttctattaaacaataatcgccttgcattaaccaatagccataaaccatgtttcgccatacccatgaggtatggcaacaaccgagcaattcactgcgataggccaatatccgagatacgctcactgttcgattcgtcgccatgagtaatctggagaaccggcgatggaacccgcctgaactcgtttcgaaccgcacactgctgatagttcctacacacgatttgatattgcatggaatcgttgtgtcttcagcaggattcagcggtttcaggaaaggctattatggattcgcaatccccatccgcaggtgcccggccgattacgcacacgaccactcccccggcgcgcaagctccccgatattcatcttgatattgtgttggtcgtcttctgcggcggtgcgatcggcaccgctatccgctatgcgttcgcacagattcccgcggctggcagcttccataccggcacgtttgtggccaacatgctggcttgcttctgctatgcagggttgaccgcttacttggccggctcctctcgattcgacgcacgctccaaggaattcgccagccgcggactcggcatgggcgtatgcggcggcctgtccacgatgtcgacgcttgcgttagaaggcttcaccgcgatttgcgacggtcaggcggcggccggcatcgcctatctgctggtgacgtttgtgcttggattggcttgcgcaactgccggcgtatggaccgggacacatctggccggctctccatcaggtgatgcccaaactgccgtatcgactcattcggccagcaccgcgaagatggaatcgactgcggatcccgcatctgcctctcactcttctgccacgatcatgggaggcgcacgctgatggcatctgcaatcttgccaattctggtatgtctatgcggcggcgcgggcgcttcctgccgctatctgctggatgtgaccatcaaaacgtattggcagcgcgcatttccgctttccacattcactatcaatctcattgccggttttctagctggattggttgctgcgctggcacttggcggaacattggccgaaccgtggcgtctggtactggccactggtttcctcggcggcttctccacgttctcgaccgccatcaacgaaatggtgacgctcttccgcaaacgccactaccccactgcaacggcttatctggcgttatctctagtagtgccgattgctgcggcggcctgtggttttctcgcatagaagcgatattatgccgcgagattgatggaagacgaatggccggaggtgcatggcatggcagacacagaagagaagaacaagcagaacgggctcgccgtgctgggcaagtatgtgggcgtttcggccacgcagaccattgtggagtatgcgacgttcgcgattttgcacttgcttggcgtaccctcacaggtctccaacggcatcgcagtagtgtgctccgcgacctacaacttcgtgatgaaccgcaatgtgacgttcaaatcgtccagcaacttcacccgatcggtggtgctgttcgtactgctgtggatctggaacttcacgttcagcacgctgctgatcggctggatgccggacgcgacgggcctgagcccgtatgtggtgaaattcatcgcgatggcctgccagttcggctggggctatccgttgtgcaagtacgtgatttttaggtgacacattccaattgctcactgtcgttcgccttcgcctatttgtatttggagcgcttatcagaagaacagcatcgcaacacctgcggcgaagcacatgagcagaatcgatgtcaggaagctggcgagcatcggcttcttgcccttggaagcgatggccttgaagttcacgttgatgccgagcgcggccatggccatgccgagcacgatgtacgcaaagtccacgagctgcggggtgatggaggcgatgagcggcacgaaggtgccgatgatcgaagcgccgatgaagccgagcatgaaccacgggaaggccacagtcttcttgccggtgttctccacctcggagtgcttcttctcccaccagatagcgatgatgatggccgcgaacacgagcatgagcacgcgggaaagcttcatgatggtggcgatgtccaccgcgccgaaagcgtcgccggcggcgaccgcgtgggcgatttcgtgcagggaagcaccggcggtgatgcccagctggtccttggtcatgccggtcagcgggccgagcgcgatctccagcaacgcgaacacagtacccataatggctacgatggccacggccatggtcacgtcgttgtccttctcgtcttgcttgtcctcaggcaccttgatggaaccggccaggcccatgacggcggccgcaccgcagatgccggtgccaccggcggtcaggatggcgagcatcgggtcgacaccgagtttgcgggcgatggcatagcacacgatgatggtcagcgtgacgaccacagctgcgatcggcagacacttgatgccctgcgtgaacagcacggcgaggttgagcttgaaaccgagcaggatgatgccgaggcgcagcagcttgttggaaatcaggccagcggcgtccttgacgcctgccttgcggccatcattggaaccgacgtaggcactgcggatcgggaactggatgatcataccgatgagcagcgcgatgataagcgcgccgaacaggctgaatccggggaactgcttgagccaggaggcgaacagcgaggccagcagagtcagaacgccaatgaacaacatgtcaacggtggcaatgcgcttccaccattttgtacagaactctctcacggtgtctattgaatcccaagtgtttacatcggtcaaatcattgcgactaatacatatcatcgattttgccgataccatactctggctcccctctggaggggagccagaaaaaactacccacgtaacgcagcgataatcgcttccaccagctctcgctgatcgtgcgtcaggccggatctcggcaccaaggcatagaaacggcgcacgaattcgtctccgagctctcgcgccggcactccagaaggcactgcggcttccgaaatcagcgactgcccaaagccggaagacaacgccgccgcaatcgcggcattgctggacacctccatggtgcgaggcggcaaaccctgcatggtcttgaaatacaaatccgtgtaataccgcacaccggaaccgtgctcgcgcaccatccatacgccgtctggttctcccgccaagaccagccggtcctcgcacagggtgacacggtccaccgaatcgttcacgatcggcttttccaccacgccgagctgcacggccttcatgctggcctgttcgagaatcgcatccgagttcatcacgtgtacagcgaagtcgaaaccatccatgttccgagccatcaccggcaacgccttcggcagcagaatcgccgcggtcgtgtgcgagaacgacacggccagcggctcacgcgcctcctgcacgcgggcgatctgctcacgcgtatcccgccataatccgtcgatgccgatggcagtctggtacagcatccgcccggcctgtgtgggcgtcacgtcacttttcgcattgcgcacgaacagcggcgcgccgaccatctgctccaattgggcgatacgcgacgacaccgtcgactgcgataccttcagctcatcggcggccagcgtgaactgacccacctcgtatacggcgaccagggtttcgagcagagggaacatggtttaactgtacgctgtatgatgcacgaatatttcaattagcttgggcgtagccctaggccacggacctggaccaccctcagtctcgcttcgcgagccagctcccgccagcggaagcccaatggctttcacatcactatgcctcgcgcagttttgcgagctgcgccttggccttgtggagtttggcatagatctcgttgcgctgggccgggttcttgacgcgctgatggtcacgagtgagcttgtccacttcggattcgagccgagcaatttcagtatggcgaatgatgcgcgcatccagattctcgacctccggcgtacccaaaatggtctgtgagcacagcgatgcccacagctcatcaatagtagagccggccagctccagctgggcctcccccgccggctgccagtcgccggcatatacctgatagatcggcgtgtgcccggcacgccccggtatggcgcggcgcacggcgaacgcgcattcctcacgcgtgctgccctcgaacggcacgtcgcgtacgcacacgaacacgatgcccgatttgcgctgtccggcgatcaggtcgatgacttcgttcggtatgccggtggctttggccgtaagcttcagtccgatgaccagcacttccgggatcagtttgccgtccgcaagccccgtgttggccgaccgggccaacgccagcatggtgatggattcgatctcgttcaccaatcgctgcttgagtttgccggaaatcggcgctttgcctacgaacaaggctttcggcagtgtgcctttggcttcgggaatcgccgtggaaacgggcagtcccagcgaaattgcggatacagaaccacagtgagcggcctgtgcaccagtcatcatcgaccttctttcccggcctgccatcagtgtcatatcctcgcagtgcagcagtccgtttatctattgaaaagcaacactagcgcatccaggccggaagtcgtggtacatatccatatcctgctgcggttatagaaaatcccctccgagtttcctcgaaggggatttcctataacgctagttcaagcgaagattcttgtctgatgaaaatcaggcgaggatcttggtcacacgaccggagccgacggtgtggccaccttcacgcacagcgaaggtcaggccttcctccatagcgatgggctgaatcagctcaacggtgaaggtagcgtggtcgcccggctgaaccatctcgacgccttccggcagctcgatgacgccggtgacgtcggtggtgcggaagtagaactgcggacggtagttggagaagaacggcgagtgacggccgccttcgtccttggtcagcacgtagacttcgccctcgaacttggtgtgcggggtgacggagcccggcttggccacaacctggccacgctcgacatcgtcacggccgagaccacgcagaagcagaccggtgttgtcgccagcctcgcaggcgtccatggtcttgtggaaggtctcgatggaggtgacggtggtctgctgggtcggacggataccaacgatctcgaccggggtgttgacggccagctggccacgctcgacacgaccggtgacaacggtaccacggccggagatggtgaagacgtcctcgatcggcatcaggaacggcttgtccaggtcgtgaaccggggtcgggatgtagtcgtcgacagcgtccatgaggtccttaacggactggacccacttctcgtggtccggagcgtcgtcgtgcagagcaccgtaagcggaggtgtggatgaccgggcagtcacggtcgaagccgttctcgtcgaggaggtcgcggacctcttcttcgacgagctcgatgagctcttcatcgtcgaccatgtcgcacttgttcagggcgacgaggatcttcggaacgccaacctgacgggcgagcagcacgtgctcgcgagtctgggccatcgggccgtcggtggcggccacaacgaggatagcgccatccatctgggcagcaccggtaatcatgttcttcacgaagtcggcgtggcccgggcagtcgacgtgagcgtagtgacgcttctcggtctggtactcgatgtgggcgatgttgatggtgataccgcgggcggcctcttccggagcggaatcgatctggttgaagtcgtactccgggttgacatccgggaactcctcgtgcagcaccttggagatggcggcagtcagggtagtcttaccgtggtcgacgtggccgatggtaccgatgttaacgtgcggcttagtacgctcgtacttttcctttgccattacttttgtcctcctggacgtctcgtgagtttcctgcaccctttcgcacaggaactcgcttattctactgggtttctgggttatgtgccactttgaagagccagaacccagtcagcggtatacgatattaccgctgactgaagacactggctacttcatgcagtggcgcgtgtcactcgccgcgctgggccttgatgatctcctcggagacgctcttcggcacctcgtcgtaggagtccatctccatggtgaacatggcacgaccctgggtcttggaacgcaggtcgccgatgtagccgaacatctcggacagcgggaccttggcgtcgatgaccttgacgccgacaccgtcggtcatggactggatgttgccacggcgctggttcagatcgccgatgacttcgcccatgtactcttccggcgtacggacttcgaccttcatgatcggttcgagaatgaccggcttggccttcggggcagcttccttgaagcacatggaacctgcgagcttgaaggccatttcggaggaatcgaccgggtgcatctggccgtcagtgacggtggccttgacgcccacgaccgggaagccggcgagaacaccggactccatggcctccttgacaccggcctcgatggggccgatgaattcggcggagatgtggccgccggtgaccttgttctcgaactcgaaggtcttgccctcggtggtgtcgagcggctcgaagttcatcaggacctttgcgaactggccggaaccaccggtctgcttcttgtgggtgtagccctggtccatgacggccttgcggatggtctcgcggtaggcgacctgcggcttgccctggttgcactcgaccttgaactcgcggcgcatacggtcgacgatgatgtcgagctggagctcgcccatgccggcgatcagggtctggccggactcttcgtcggtcgtgacctggaaggtcggatcctcttcggccagcttggacagggcgatgcccatcttctcctggtcggccttggtcttcggttcgacggccacctggatcacaggatccgggaaggtcatggagtcgagggtgatcggatcgtcgatggcgcacagggtgtcaccggtggtcacgttcttcaggcccacgaaggtgtagatgttaccggcgtcagcgcggtccatcgggttttccttatcggcgtgcatctggaagatcttgccgatacgttccttcttctcgcgggtggagtcgagcacggagtcgcccggcacaacggagccggagtagacgcgcacgaacacgagcttgccgtagaacgggtgggtggagatcttgaagaccagagccgcgaacggatcggacttgaccgggtgacggtcgatctcgacggactcatcgccaggcttgtagcccttgatggccggcacgtcttcaggagacggcaggtaatcgacaacgccgtccagcatcggctgaacgcccttgtccttgaaggcggaaccgcagaagatcgggaaggcttccttggcgatggtgagcttacgcacgccagcgcggatgtcttccttggacaggtcgccgtcctcgaagaacttgttcatgaggtcgtcgtcggcttcggcagcggcttccacgagcttctcgtggtactcctgagccttgtccttgaggtcgtccgggatctcagtggtgtcgtacttggcgccgagctcctcggtgccgttccacacgtaagcctgcatctcaaccaggtcgacaacgccagtgaagtcgttctcggaaccgatcggcaactgcatcacgatcggagtagcgcccagcttctccttgatggtgtcgacggagtagtagaagttcgcgcccagcttgtccatcttgttgatgaagcagatacgcggaacgccgtacttgtcagcctgacgccacacggtctcggactgaggctccacgccttccttgccgtcgaacacggcaacggcaccatcgagcacacgcagggagcgctccacctcggccgtgaagtccacgtggccaggggtatcgatgatgttgatctggaacttgtccttggtgtcgtgggactgacggctccagaagcaggtggtagcagcggactggatggtgataccacgttcctgctcctgcgccatgaagtccatggtggaggcgccgtcgtgggtctcgccgatcttgtagttcttaccggtgtagaacagaatacgctcggtagtggtggtcttgccggcatcaatgtgggccatgatgccgatattgcggacgtcgtggaggtccgaaatctcttcagccatctttttccttagttttactcagggcgagtgattaccagcggtaatgagcgaaggccttgttagcctctgccatcttatgagtatcctcgcggcgcttgacagaagcaccgaggccgttggaggcatccaggatctcgttggcgagacgctcagccatggtcttctcacgacgggcgcgggagaaatcggtcagccagcgcagcgacagggtgttggcgcggttcggcttgacctcgaccggcacctggtaggtggcgccaccgacacggcgggagcgaacctcgagagacggacggatgttgtccagggcgcgcttgagcacagccaccggctcctggtcggacttctccttgaccatatcgagcgcggagtagacgatgtcttcggcgatcgacttcttgccgtcaagcagaatcttgttgatgagctgcgccaccacggtggaaccgtagatcggatcgggcagcacgacgtgcttcttggaaggtcccttacgtgacatatctcttacttcgccttctttgctccatacagggaacgaccctgcttacggtccttgacaccctgggtatcgagcgcgccacgcacgatgtggtaacgcacacccgggagatccttcacacggccgccgcgcacgagcacgatggagtgctcctgcagattgtggccttcgcccggaatgtaggcggtgacttcgatgcccgaggacaggcgcacacgagcaaccttacgcagagccgagttcggcttcttcggggtggtggtgtaaacacgggtgcacacgccgcgacgcagcgggctgcccttcagggccaaagtcttggacttcttcggctttgcctgacgtcccttacggacgagctgttcaatagtaggcaacttgaattctccgattcagtggtttctcttgcttttgtgtgaccgccgcactgcacccacacttttcagcacactcgcttggtatccgcctgttggcggcacccgacgaatcggaaaagatagcccagtccaccggcccgatggccttcgcccctcccgtcggcgcattactgcgtgcgatcagcggtttgaaggatatcccagcatgctcgcctgttacataaggcgtgctgctggcacacacgaatatctatattacgattcctccggacaacgacgcgccgggccacaactcactggtttggggacctcctgcgcccccgtacttttcctctcctcccaacgcaatattccaatgcgtcgcaaaacacacacccaactattctcccaacgcaatattcccgggaatgcgtcgcaaaaagggaacgccacacagcaggtgcccccgcggagactatgtcacacgggggcaccgccaaggaggttacattatgtttcttttcaccacatccgcttctgtgttatctgtttccagcacatcctcgtgctcttccatatccgatgggaacctctagcgacccggcctctttgccgtattaccttgccgctttctgcattaccaattatagcaaaaccgccctcgcgaaacgcccgatacctcaatcgggagtaagcgggagcggctatgttatgcgaggtaggaaaggtggatgaccgactgactggagtcgtgccttacccgacctttctcaccatttcaggatttcaggcagcgaccttggcggccttatcggcgtcgaacgggtgggccgctgaaacggtgctcttggcagagcccttctcgccattgtcggaatcccagtggatctcgtgcttgtcatcgtggttgcgccaccagctggacaggatagagccggagatgttgtgccacacggagaagaaggtggacggcacggcagcgagtgggttggttgcgaaggaggtcagggccagggttgcgcccagagcggagtcctgcatgccgacttcgaaggtgatggccttctgctgtgcgtagcggaagcccttcgggtagatcttgtacatcagcttggagaagccgaagcccagcgagtagccgcacaggttgtgcaggatgaccaccgggatggccaccagggagctggccacgaacagcttcggaccgttggcggcaacgaccacgccgatgataagcagaatagccacctgagaaacgataggcagggcgaccgtaaccttctcgatcttcttgccgaagatcatgtggcagatcacaccgagggcgatcgggaagagcaccaccttgacggcgttgaggaacagggactgagtcggcacggacacgtactgagaagcgagcagctgcatcagcagcggaatcatgaacggggcgcacagggtggagaggatgccgatggagacatcgagggccacgtcaccacgggacaggtagctcatcacgttggaggaggtgccagacgggcagcagccgacgagaatcacgcccacggccagcgggccggacaggtggaagatcgcgcacagggccacggcgatgagcggcatgatgatgaagtgagctacggtgccgacgatgaccatcagcggctgggtcaggatgcgcttgaagtcgtccagcgtcagggtcaggcccatgccgaacagcacgatgcccagcatgtagccggtgtacgccttgccccacaagctggcggccggcacgaagtagttgaagacggcccagacgatgacgatgaccgtaaaccacttggtcagccaatctgcaaaggctttaaccttttccatggtgtttctcttcccttgtttggtgtaggtaacatcgcatgaaactaggcgggtcgcggttgatatgaaacataatgctcacattgcgaacactcacgtaatcatttctgcaatccccggtcgtaccatcacaccgtcgtgtgccttgacttttcatcaatcgccgcacaagacccactcatccacatcccgccatctgagacagcccgcagcctggccccaagaatgaaaccgaccacttgattccatcgcgacacaccgatgagcacacatccgcaaagttgtgtatagtattcacctgttgcgcgaattcagcttgctgaatacggcactatggtggccatagctcagttggtagagcatctgattgtggttcagaaggtcgcgcgttcgagccgcgttggccaccccactaaaacccttccgttcgcggaagggttttgttttttctccctgaattccccgctcctgggttataggcccaataggcatgccgggaaccaccgcgttgtacactcagggcatatccaattcaccgaacataaggacaaaaggtccgtcatgctgtcttttgagaacgattactcccgcgccgcccatcccgcggtgcttgaagccgtggctgaagccaacaaccatctgtattcgggctacgggtccgacgaactgagcgatcaggccaaggccaagatccgcgaggcctgcggccagccggacgcggatgtgtggttcctcgtcggcggcacgcagaccaaccaggtcgtcatcgacaccatcaccccggcgtatgcaggcgtggtcgcggtcgcctccggccatccgaacgtgcacgaggccggcgccatcgagttctccgggcacaaggtgctcacgattccccagcacaacggcaaaatggacccgaccgaactggacgagttctgcaagaccttctatgcggacggcaactacgagcacatggtgttcccgggctccgtgtacgtctcgcaaagcaccgaatatggcaccatctactccaaggccgagttgcaggccatcgccgatgtggcgcacaagtacgacatgccgctgttcgtggatggcgcgcgactcggctacgcgctgaccgccaccggttcagacatgacgctcgcggatctggcgaccatcgccgacgtgttctacatcggcggtaccaaggtgggtgccctgttcggcgaggccgtggtgtttaccaagcacaacacgccgaagcacttcttgaccctcatcaagcagcacggtgccttgctggccaagggctttgtgctgggcgcgcagtttgacgctttgttcactgacaacctgtatttcaagatcgcccgcaacgccaatgaggcggccgatcgtattcgcgaggccctgcgcgccaagggctacacgctcactttcgaagcgcccaccaaccagattttcgtgacgatggatcagccgactatcgaccgtctggagcgcgaggtcaagctcggctttaccgagaaggccgacgacacgcataccgtgatgcgcatctgcaccagctgggccaccacgcatgaagaggtcgatcagcttattgagttgttgtaaaacccttcgctaatctctccctccgtcatcgcttcgcgatgccacctccctcatcagagggaggttttttcgtagctccctctgatgagggagctggccgccgcaggcggactgagggaaagacctctccgcaaacgagaaggctcctactcccctatcgccttgcgttccatatccacgaacttgtggaccgaggcttccacggaataatgcgccttggtgtattcggcgtatttttcgccccattcggcgcgctcggcctgatgtgcaatccaccaatcgatgcgtcgggccagcagggccgcgtcccgcacggggaacaacgactcgtcgatcagcgcgaactggctggccgccgacagttcggacgcggcgatcaccggcaccaatccgcacgccatcgcctcgatcacgctcaccgattcgatgtcggcaatcgaacaatgcacgaacaaatcgcccgaacgcaacaaatcgggcatatcggcgtgcttgtggaatccgatatcggccttgcgcgccagcaaacgcccggcgcggaacttgagatactgcttgagcggcccagtaccggcgatcaccagctgaatatcgccggcgtgccgggacatcgacaccgccttgatcagcgtaatctgatctttctcgctagccagtcggccggaagcgatgacgcggaacggcacgggagccgaggcatccggatcggccggcttcttcggcgaatacaccggtgaataaccattggaaatcacgtgcaacttggctttatacccgtgcgcgcgcaacaggctcgcggtcatttcggtgggcacatggatgtggtcaatgtgcttgtacagccagtgcttgaacagccagtacaggaagctggaaataccgggaatgcgacgtagagggccggccgaatacagcacgttctccggctgcaggtggaatccggcagtcacgggaatgcccatttggtgggcgactttagcggcacgacggccgaatttgaacggcatatagatatgcaccacatccacgccttgaaaggcggtgcggaacaacgtgtcgctgggttcggcgaattgcatgagctgcttggcggccacccacgagacgagcggcaccctattcacgcgcgccggatattcgggcgcccctataccgacaagcctcacatgatggccttgccgctccaattctgcagcccattgcaaggccgaattggaggtgccgttgccctgattgcccaccgtatcgaccacaagagcgatagtcagcggacgatcaatgctctcttcaatcccgttttcgcgcattgcctcatcctaaaccaccgcgctgcaatggcgtcggccgcgctgcctgaacgcgtatgaaatggtatgggctgccgcattttgcccaatattgaatcacgcgctccgcagcgcacgtcgccgaatccgagccccgcataggcgaaatcatcgcggcatggcagaatgtgggtatgactgagaacgccgtaaatactgccgtgacttccacctcctctcccgcaattcccgccgagacttccgccgtctcccccgcaactcgcgcagccaaccgcccgctgggcacaccgctgggcaagcaccccacccgcgtgctgtttttgggcgctggtgagctgggcaaggaagtggccatcgagctcatgcgactgggcgcgtgggtgtgcgccgctgactcgtatgccggcgctccggcccagcaggtggcgcatgaatatcgcgcgttggatatggcgaatgccgccgaattgcaggcattgttcgatgaaatcaagccggacatcatcgtgcccgaggtagaggccatcgccaccgatgtgctggccggtactgcggccgcgggcgcccaggtggtgccgagcgccgaaatcgccgcgatttgcatggaccgcgagcgcctgcgcgtactggcccacgaagaattgggcttgccgactacaccgtatcgttttgccggctcgctggaagagctgcgcgccggagcttcggaagtcggctatccgtgcgtggtcaagccggtgatgagctcgtctggtcacggccagtcggtggtgcgttccgccgacgccatcgatgccgcttggaccgaagcgcaggagggccgccgcgccgccgatgagggcgatgtgtcgcgcgtgatcgttgaggcgcttgctccgctggagcgtgagctgacggtactgactgtttcttcgtccgccggcattgtgacgtgcgcgccgatcggccaacgtcaggagtccggcgattaccgcgagtcctggcagccggctaccgaacccgatggtgaggccgagcgggcgcgcgacatcgcacgtaccgccgttgaaggcttggtggccaaggctcaggcggccggcgaaaccggttggggcgtattcggcgtggaactgttcgtgctcaccgacggctcgattctgttcaacgaggtctccccccgtccgcacgataccggtatggtgacaatggcctcccagcgtctgagcgagttcgcgctgcacgcccgcgcgattctcggcctgccgatcacccccgagcatgtgtcgctcacgattccggccggctcggtggcggcaagccatgcgattgtggtggccggcgacggtgaggtcgagttcaccgatgtggccgctgctctggccgaacccggcacggacctgcgcatttttgccaagcccgaagtgcatggccaccgccgcatggccgtggcactggccgtcggcgagtccgaagccgacgcccgtgccaaggccggcctcgtggccgatgcgttgacgattaccgtggagtagtccacggcctgatcagctcagcatggcctcaatattattgccgtccgggtcgtggatgaacgatcatgacgaacctccttgtaccatttcgtcactcccattatcgtgtgtatatggccgaagagtcatgtttcgtctattgacgaacatctgagtattcacacgcgcttctgcagatatcttcatgccggaaggctacacgaccggagacgagctgatcgtactggccaatgacggccgcctccgccatcccaacagcgtatggccgttcgatgcagcgacgtatgatgcgccggccgcatcgtagcgtcatgctgagtgttgttgtagccctcgattggtacccttttaccgttagttcacccagaaattccactcctgaaaggtgagtcatggagaagctggaaaagctctacgagggcaaggccaagcaactgtacgcaaccgacgatcccgaggttctgtgggtcgaatacaagaacaccgccaccgctggcgatggtgaaaagaaggaagacttcaccggcaagggccgtctgaacaacctcatcaccaccatcatcttcgacctgctcaagaagcgcggcatcgacagccaccttatcaagcgagtggacgacaccggccagctggtgcgcaaggtgaacatgttcccgttggagatcgtgctgcgcaacgtggccgccggccacttctgctcccgtctgggcgtggaggaaggcctgccgctcaaggagccggtacttgagtacttcctgaagaacgatgatctgcacgatccgttcgtcaacgacgatgacctggtggccctcggcgtatgcactcgcgaggatctcgccgagatcgccccgctggcccgcaagattaacgaggccctgatcgagatcttcgccaagatcgacgtcaagctggtcgacttcaagatcgaaatgggccgcgccaccgacggcacgctgctgttggccgacgagatcaccccggattcctgccgtctgtgggaccagaaggaccactccggcaaggtcgagcaccttgacaaggacctgttccgccgtggtctcggcagcatcatcccggcctacgaagagatcgaggagcgcctcgccgaactcgccaagtccgaaggcatcgaagtcgccgagtaatgcattatctggctcccctctcgaggggagccaattgtctttaatttcaagaaaggatttccatggtttttcgcgtgtacgtggaaaagaagcccggctttgatgtcgaagcccagcagcttgcgggcgaactgcgcacgatcctcggactgaccggcctcaaggccctgcgcatcgtgaaccgctatgacgtcgaaggcatctcccaggagctgttcgaccagaccgtgcccaccgtgttcagcgagcctcaggtggacaatgtggcctacgacctgcccgacttcgccggcgccaaggtcttcgccaccgagttcctgcccggccagttcgaccagcgcgccgactccgccgccgaatgcatccagctcatctcccagggcgagcgcccgaccgtccgctccgccaagctgtacgcgctggaaggcgacctgaccgacgccgacgtggacaccatcaagcattacgtgatcaacccggtcgaggcccgcgaggccagcctggagaccaaggaaaccctgaagacccaggtgccggtgcccggcaaggtcgagaccatcgccggtttcaacgagatggacgccgaagccggccagaagttcatcgacgagcgcggtctggccatggatctggccgacctcgaattctgccagaagtacttcagcgaggagagccgcgagcccaccatcaccgaaatcaaggtgatcgacacctactggtccgaccactgccgtcacaccacgttcggcaccgagctggacgaagtgaccatcgatgacgccaccgtcaaggccgccttcgagcgttacctggcgatgcgccacgagctcggccgtgacgccaagcccgtctgcctcatggacatgggcaccatcggcgccaagtggctcaagaagaacggtgtcctgaccggccttgacgagtccgaggaaatcaacgcctgcaccgtcaaggtcaaggttgacgtgaacggccacgacgaggactggctgttcctgttcaagaacgagacccacaaccaccccactgaaatcgaaccgttcggtggcgcggccacctgcatcggcggctgcatccgcgatcctctgtccggccgctcctacgtgtatcaggcgatgcgcgtcaccggcgccgcggacccgaccgtgccggtctccgagacgctggaaggcaagctcccccagcgcaagctcgtgaccaccgccgccgccggctacagctcctacggcaaccagatcggtctggccaccggtcaggtcgacgagatctaccaccccggctacgtggccaagcgcatggaggtgggtgcggtcgtggccgccaccccggccgaccatgtgcgccgcgaaaccccggcccctggcgacaaaatcatcctgctgggcggtggcaccggccgtgacggcatcggtggcgccaccggttcgtccaaggcgcataacgtggaatcgctcgaactcgacggcgccgaagtgcagaagggtaacgctccggtggagcgcaagctgcagcgtctgttccgccgcggcgatgcctgccgtctgatcaagcgctgcaacgacttcggcgcgggtggcgtgtccgtggcggtcggcgagttggccgacggcctgttcgtggacctcaacaccgtgcccaagaaatacgagggcctggacggcaccgagctggccatctccgaatcccaggagcgcatggccgtggacgtggccgccgaggacgtggacgagttcctggcctacgcccgcgaagagaacctcgaagccacggtgattgccaccgtgaccgaggacccgcgcatggtgatgacctggaacggcgacaagatcgtgaatctgtcccgtgagttcctggcctccaacggcgcttccaagcaccagaccgtgcatgtcgaggaacagcagtcctacgagaccccgtggggcgagggcacgctggccgaacgcatgaacaagctggtcaccgacatcaacgtggcctccaacaagggcctttcggagcgcttcgactccaccatcggcgcgggcaccgtgctcatgccgttcggcggcaagcgtcagctcaccccgaacatggccatggtcgccaagctgccggtgttcggcgagaccaccaccgcttcggcgatggcgtggggcttcaacccgtacatcatgtccaagaaccagttcaccggcgcctacctgtccgtggtcgagtcgctggccaagctggtcgcggccggcttcgagcatgagaaggcctacctgagcttccaggagtacttcgagaagctgcgcgacgagccggaacgctggggcaagccggcggccgccgtactcggcgcgctgatggcccaggtggacctgggcgccggcgccatcggcggcaaggactccatgtccggttcgttcgaggatctcgacgtgccgccgacgctgatctccttcgccgtggccgtgggcaacatgaagcgcgccacctcccctgaattcaaggacgccgatcaccgtatcgtacgcatcgcgccgcgctacctggccgacggtctgaccccggacaaggatgcgctgcttgaggtgttctccgtgatcgaggagctcaccgacttccacgatgccctggccgtctctacgccgggctatggcgccgccgccgaagccctgttcaagatgacgctcggcaaccgcatcggcgtgaccctgaacaacagcatcgccgtggacgacctgttcaccccggcatacggttcgttcatcgtcgagctggcggacgatgccaagcttccggccgtctccaatttggtcgagatcggcgaaatcggcaccaccacctccgagtacgtgttcaaggccgccggcgagacgctggacctggacgctgtgcaggaagcttgggagtccggcatcgaatccgtgttcccgtaccgttccaagggcgaggacaagggcgcgaccgtcgagaccatcgacttccacgcgccgaagaagaccgtgtacgtcggctcttccgtggccaagccgcatgtggtgatcccggtgttcccgggcaacaactgcgagtacgattccgccgccgccttcgagcgtgccggcgccgatgtgaccacactgatcgtcaacaacctgacgccggccgccgtcgccgaatccacgcaggcgttggtcgacgagatcaacaagagccagatcgtgatgatcccaggcggcttctccggcggcgacgagccggacggttccgccaagttcatcaccgcgttcttccgtgcgccggccgtcaccgaggccgtgcgtgacctgctgaagaaccgcgatggtctgatgctcggcatctgcaacggcttccaggcgctcgtcaagctgggtctggtgccgtacggcgacatcgtgccgatgaccgacgcctgcccgacgctgaccttcaacaccatcggccgccaccagagccgactggtccgcacgcgcgtggcctccgacctctccccgtggctgtccaagacttcggtcggcgacattcacaccgtggccatctcccacggcgagggccgcttcgtggcctccgacgaggtgctcgcccagctcagggccaacggccagatcgccacgcagtacgtggacgagaccggcacccccggcatggacctggatgtgaacccgaacggctcgctgctcgccatcgagggcatcaccagcccggacggccgcgtgtttggcaagatgggtcactcggagcgttccggcaacggcctgtacgtcaacgtgcccggcaacaagtaccagccgatcttcgaggccggcgtggaatacttcaccgcctgataatcggcgcgtatcgcgtctgatacggcacacagggaaggaactctcgggttccttcccttttttgttcatgccggtcatgggctaaggttggggtgttcgcactaccgaatccgccgctgaaaggacctgtcgtcatgccgatcaacgaggcattgttcgccgcgatgaaggccgccagctacatcaagcccaacgcgggcaagtcgtacaaattgcagcgcgtggcggaagagcttatcgccaagcaggcacccgacaatccgaaatgccgtgtcgaggacgccttcgtgcctatggcggatggatatgccgtaccattgcgagtgttcacgccgctggtcgcctatggagcgcccctgcccgaagccctggaggaatcttccgccaatggcacgcccgtggcctcggcaatatccgcgattctgcccgccgtattacccaaagtcctacccaaaatactcatcaaggaaagcacgtcgagcggcaacgccgacggtatttccggcaatgccaacacggaacttccctcagtcacgccgcgtggcacgatcctgtttttccacggtggcggttggaccacaggcggcatcaacctgtacacgcaggcttgcgcgcatatggccgtacgtctgcaacgccgtgtgatctcagtcgagtaccggctggctcctgaataccgcttccctactgctgttgaggattgctatgaggtagcccggcagctgtttgctggggaattgccgatttctggggtgggtggttctgttgatgttgatcacccccagtcggctgcgccgacagcccccgccggcgggggcgatatatctgcgacaatcccagcaccggatcccgacagcatcgtgctgtttggcgacagcgcgggcggcaatcttgcggccgccgtctcgctcatggcccgcgaccgcggcgagttcatgccgcgcacgcagatgctgctttacccggtagtcggcaacgattacaatcccgagaccagcccgttcgaatcggtgcggaccaacggcaccgactacatcctcaccgcacaggacatggccgactacatcgacatgtaccgttcgtccgtggccgatctgaccaatccgtatttcgcgccgctcaccgcgcacgacctgagcaatcagccgcgcacgctggtgttgtccgccgaatactgcccgctcagagacgaggacgaagcgtacgcccgtcgcctgcaattggtgaacgacaacgtctcctgttaccgaattcacgatggcatccacggctacctgctcaatacgtcggccgtgggactggtggccaccacctaccgaatcatcgagcatttcctcgacggcacaccgctggaaccagctcccggcaccggcaccaccgccaacgcaccggagggaggcgacgcgtggcaagacgtacttggtaccgactagacaacatcggcaagttctactcctcccaggctggccgctcctcgcagaccgtgttccgctattcggccgagctggcggacggcatcgatccggacatcctgcagcacgcgctcgaccatgccatcgcccagttcccgagcttcaacgtgcacctgctcaacggcatgttctggcattacctcgaacagtcagacggccggccgctggtggagccggaacatctgccgatatgctcgcgactgcattacgggcccaaaagcatgctgttccgcgtaagctatttccgcaatcgtgtcaatctcgaggtctcgcacatcatttcggacggtcgcggcgccatcaacctgttcaagtcgctgctgcacgcctacatcgccgagcgatacgacgtgccgggcgtgccttcggattacgacggttcggatagcgacaaagccgaaaacagcttcgacaaatactacgagaaagacaaggccggcgctgcgccaggcacgaagatctaccggctggccggccccatcgaccgggccgcgcctacgttcatggaataccacgtcagcgccagcaaggtgcttggtgcagcgcatcagtgcggagtgagtctcacctcctacctcatcgccgcgatactgtgcgcgattcgcgacgtcatgccctcgcgcgcccgcaatcgcgcgattcgcgtggatattccggtcgacttgcgcgccttcttcaggtcggagaccgtgcgcaacttctacggcatgacttacgtggcgtacacgccggccgaaatcgaagccgatgaggactccgcgaaaacttccgcaacaagcccagacgcagccggcgacggccagcagtccgccgcccgcaccgcgcacggcaacggtatgggtggattgctgaccgatgagccgttggccgacatcgcccgccatgtgcaggagcagctcggccatgccaccagtcgcgagcgcgtcgaatcgcatatgaaccgcatgattgcgctggaaaagaatccggtgctgcgtcttgcgccctcccctgccaaggactgggtgctggagctggcccggttcatcgccgaccgcgagaccacgaccaccgtctcgaaccttggccgagtcaccttggacgaacgactcgcgcgccatgtacgttcggtgagcttcctcaccacaccggccagcctgaatttcacggtctgctcgttcggcgacgacctgagcatcggcatctccaccatctaccatgatctgaacgtcatcaagaacctgtgtcggattctcgccgcgcagggcatcagcggccgtatgaacatcgctggcgtgcatgtggagaaaggagcgtcggcatgaagcattgcgatgcctgcaccgtcgatttcaccggcgatatggcccgttgcccgctctgccagaacgaattgcgcggcgaggcctcccccgccgcattccccgcgcagcagatctatctgcgtccgaggcgtttggcggtggaaatcatcacgtttgtaaccggcgcgattttgctgctgcatggcttcttcagctatctgttttcgtggccgataccgattgccagtgcatcggcggccgcgctgatcatcagcgtgctgttcatcaatagtgcgattctgcacgtgccgcggccgcttcgcctcatgtttcgatatttctatatcatgctggcgattgcgctggtctggtttgtggcgacgatgaatcatgtcgtcaccatgttcgtcataccgatcacgtgtctggtttcgctggtctttgacgtggtgctgcttatcgtgctgcgggccaaggccattgacgagtacgccaagtatctggcgttcgacatcgtcgctggtctgatgcctctgacgttcattccgctcggctgggctccgtgggatgtactggtgatggtcagcgggctggtctccctgctggtgctgctcggcctgctcgtcttcgcccgccgtcagctcttctcggaattcggcaaacagttctcggcctgattgcctcgtgcgctcaatcgcccgacttaggatggaaaccatgagcgaacatgtggagcatgggtttgggccggtgtgggatggcgagtcccgggttttgattttgggatcgatgccgagtccgaaatcccgagcggcggcgtacagccgaggcgagcatccgcgagagcggcagcaggtagaggaaggtcgcggcggccaggctgagtgtgggcgcgttgatggtggcaagcggcacggcaccggcgatcgaccaaggaatcagcggagcgatcaccacggcactgtcttccaaatcgatagcttgtgcggagcgttcggattcgtcgtcgccgtacagcccaccgcacaactggtgagtgagcatgatggtgagggtttggttgcaggcgagcgccgccgcgcaagtcgcggtaatcatggtggcaccacatgcgccgatgcgatgaccgagcatctcgatgacctgctgcagccgagcaagcatccgcgtctcggcaaaaatgccggcgtaggcggaggagatacagacagtggccatcacagtgagcatggagaggatgccgccgccgtccaggagtgcggccacctgcggattttgcgcatggtaaccgaaaataagcagccgcaacagttctgcccattccatgtgctgcacgcccacgcataccgcgaccgaggcggcaatgctggcgagcataagcagccgaacatccacacgcagcaacgccaacacgatgaccagtaatgctggaactagggtaagccaatgcaaatcgaaggccgatgagaacaatccgccgatatcggttatgctgcttgcgttggttgaaacagccgctctagccgagccagccgagccagccgtagcagccgcactagccgcaccaaatccggaaccaccgctcgcgcacagccactccaccaccgcagccgcaacgtataccacacaactcagcacaaacggcaccgcacccgtgcgcagcatgcgggcaatagtattgaacaggttcgtatgcgtaagctgtttgaccagcaaggcactggtggaaaccggcgaacaacgatcgcccacatagacgcccgcaagaatcgcgccaccgagcatcaccgggttcgcctgcatcgacaatcccaacgacatgcagatggtgcccatagtcgccgcactggcgaacgacgacccgaccagcaccgacatcgccgagcacagtagaaacgacagcggaatcaccgtggcggcgtgaatcaccgcggtcgaatgggccacgatgaaggcgatggtcccgctggcccgccacagcgaggtcagtacgccgatgagcacgaaggccaccaccacggtccccgcggaccgtacgctgccggccgcacggctcgccatcgcgcgcaacgagcaccggcgaaccagcccataccccatgaacagcagcacaccaacgaacagcgcgggaataatcgaccagccgagggcgacgctggcaaacagcaccgcacagaacagcaacatcgtgcccgcttccagcatgcgatcctctcctcttccggctacagcctcatctcagattccatctcatgacccgcagtcgcaaacatcaacgctattcgcacgagccatgactcaagataacaggagattctacgacgaacgtatggcactggttattgcgcaatcattatggctggatttagtcaccaccggaaccgcgaacagccagactaatattgccaacaattccgccacccccaacacgattccaaatgaacgcgccattgcttcaggcgatctatcttcgttggcacactgcccgtttttgctgggcaatccgcaggacatcgatggccgcatcggcgagattctgttccgccgtgccggttttgagccgaaagtcacagcccgttcggataacgtactgactctgctggaactgtgccattacggcatgggtgcctgcctatgcccggagcggttcctgccagcgctgcttgacggcgaacggttgcgtactttgcgcgtgctggattgcggcccggataccgcatatgccattcagttcggcgttccggccacatcgtatcggtggagcgtcattgatgatttcattcgttgcgcccgcgaagtcaccaccggcgtgtcgcaatagccgccaacttgcgttcaagtggggttgaactgtttcaataagaattgttagcgttcacggccggccatgaagagacgacggtgacgattgattatcaaggagcacacatgaagtatcgcagcgttggcaagtcgggactgaagatcagcgaggtcgcactgggcagctgggtcacggatctcaagggcacggcggctgaggacgtggccaaggagaccgtgaagctcgcctacgattccggcgtcaacttcttcgactgcgcggacgcctattctggcggcgcggccgaacgcttcctcggcaagacgctgaagcagtacccgcgtaaggaactggtcatttccagcaaggtctacttccccaccggcgaaggcgtgaacgaccgcggcctgtcccgcaagcacattttcgagagcatcgaccagacgctgaagaacatgcagaccgattatctggacatgtacttctgccaccgttttgacgagaccaccgaccttaccgagaccttgcgcgcgatgagcgacctggtcgcccaaggcaaggtgctgtactatggcgtttccgaggagtggggttcggctcgccttgaagaggcccagcgcatcatcgaccgctacaacctgtacccgatcaccgtggttcagccgcagtacaacctaaacgaccgttacatcgagcatgagatcatgggcacctgccgcaagctcggcatcggcatcaccacgttctccccgctcgcgcagggtctgctgaccggcaagtaccgcaagggccagccgctgccggccggctcgcgcgccacctggcagtccgaccaccagatcaacgatctgctgaccgatgagaacctcgacaaggtcgagcagctgcgcaaggtggccgacgagctcggcacgaacctgccggtgctttccatggcatggatcctgcagcacccggagatcagctgtgtgatcgccggcgcctccaagcccagccaactggagaacaacatgaaggccgcgggctttgtgattccggctgacgcgatggccgaaatcgacaagatcaccggcttccaccgcttcgaacgtcacgtaggctgacgaatctgagacttcctccaacgagagcgattgtcaagcgccgaaatcggtatcgccttgggcttcggcctgagcgatggcggtttcggcgttttttgctgtttgctcgatgacttggttgtagccggtcagggccgcgaacggcatgaactgcgcggcccgctggtggcgggacatgtgcggatgcttgcgcgactgatggtgtggcaggttgatgatgtcgtcgtacgcacgggtctcttgcagggtcatgcgcgatggcctccgatctgacggttgcggtcctgaccggtggcaccgtcttccatgtccatggctttgatgacggcgttgcggccgaatttacgtttcacatccagcagcgcacgctggatatcatgctctccatctttttcgctggtggaatcggatccatacgattgggccccgtcatcaccgaacaagtcgagctgttcatagcgtttgccggcggccagctcctccggagtggccacatcatcggcgatgacggtcaaccgcctcacaagcaagcgtgaatccacaatgcgctcgtacaacatcgtcatagcctcacgaatacgtgccgacgacgaggtgaaatcacccaaaccaatcgacccgaccgcgctcttgggcaccttgcgcccaaatcggtcgatggtcaccggcccttgatagcttttcgccgcccgctcagcggcacgtttcatcgcataatcagcgcacgaatcgagctttgacgaatcaagactgccgatgtcatagccgacggcgagcgtcagtcggttcgtcagtacgcttttatcgaccagatcgagggccagcgcatcagccatctccttggtgatcagccgggccgtggcatagtcggcggggccggtgagcacctgcccactgctaatgctgtgcgcacctggctcataggatcggatatccgcgatttcgcacggctcccagccccacgcatggtcgatgagcagttcggcattgacaccgaacatgcgatacagcaggtcttcgttgtagtaatccgaagcacgacccaccgagcatcgggcgatatcgcccatggtcatcagtccggcatgctcgagcttcttggcatagccgcgcccaacccgccaaaaatcggtgagcggacgatgatcccaaagcagccgacgatatgacatttcattcagttcggccacgcgcacgccgtccttgtcggcgggcatgtgcttggcgacgatatccatggcgactttggccagatacatgttggagccgatgccggcagtggcggtgatgccggttttggtgaggatttcgcgcacgatggttcgcgccatcgcatgcggccccatacccagcgagcgcagatatggcgtggcgtcgatgaacacctcgtcaatcgagtagacatggatgtgctcgggtgcggcgtatttgaggtagatgccatatatttgcccgctgatttccagatagtgcgccatgcgcggcttggcgatgaccatcgaggctttgagccccggcgagcgttccaggtcgcacgcatcgcaggactccccgattaatcggccgccgggagcatggaccgcgcgctcgatgttgactccattcaggcgctgttttacctcaaacagccgcgcacggccaggaatgccatagttcttcagcgagggtgagaccgccaaacatattgtcttatcggtgcgggtttcatcggccaccaccagatgcgtggtcaacgggtcgagcccacgagccacgcactccaccgaggcatagaaggacttgagatcaatggcaatataggtatgctcgcgttgcgtcgataccgttccgctgcccatcgccatcacctccttaccaccgctggcccgaccagcatatcaacacagtcgaacatttgttcgatgcaacatgcctgttcgaagctgccgaagtcgacgcacgcaacgcgcccaagcacgctcttcacccacgccacacgcgcagcggcggagcagcggcatgcatgcgtaccatggggaatatgaagaaaagcattacagcagacagcgattttgcagcgtgggcggcagcccgatcccagaagacgaatcgatcactggcaggagcccgactcgcgattccggagccacagaagcatgccgaaatcaagtctcaggcccagcaatggggcatgaccgtcgaagatgccacgatgaccgacgagcacaacgaggaattcctatgcgacggcacacaaagcatcgattccatcaccgatatgcgcaaggcaagcggactggaggcaatggagtacgcggaacagcacatgccggtattacgcgacaccatggatagcctcaccactcgcgtcgatttctcaggcattcgtattgccgtctgtctgatactggagccaaagaccgcgattctgctgcgcaagcttaaggccgccggcgcaatcgtcggcgtatattgcggcccggattccacggatccccgagtggcggaacagctgcgccgggaaggaatcacggtcgaatccagccgagactggaccgcggaacaggcgcacgaggcggccctgcacctgctggacgaaatacagccggacatcatcatcgacgatggtgccagcttcgcccgtctcgcttcgctcgaacgccccgaactcacggcgaacctcattggagtggccgaggaaacgaccagcggcgtacgcgcgttccagcagatgcaggaagcgggagccctcacctacccggtcgtagccgttaacgacagtgtgctgaaaaccggattcgacaacgcccacggcactggggagacatgcgtgaccaccatgcagcgcattctcggcgagcatgcattcgacggtaagaacgtcaccgtcatcggctacggcccggtcggccaaggcttcgcacggcgcattcgcgcgcttggcgccgaagtcaccatctgcgatatcgatccagtggcttcactcaaagcggtgttcgacggcttcgccgcacaagacattgacgaggcactcccttgcgcggatatggtggtgtccgccactggcgtgagacatacggtcacacttgagcacatgtgcgcaatgcacgagggcgcggcgctcgcagtgatcggcggcatcgccaacgaaatcgccttggacgaggtaagcgacttcaccccacaggtcaacagggacaccgtgcaactcaatgttcccgacggaccaacgctcacgctaatcgccgacggcgatggcgtgaactacacggtgggaggcggcaatccaatcgagatcatggatctgagcttcgccgtacaggccagcgccgtcgcatatcttctggaacatcgaggcacactggatcacacgcttatcagacttgacgcagcgaccgaccagcgcatcgccgccagcgcgctcaaggcgcgcggataccgagccagccatgccgtggaggacaacggctacaattggcgactgaccagattcgcggaaaacgaccgagagaacgccgaccgatagccatagacacggcaccgagcacaacgcagcgaggagaatatgaccgacaacacctggccgaccgtcgataccgagcttatcgatgatgtgacactgtattccgccaaactcatcatccccgtgacgggccccgtcatcatcgatggcgcagttgccatacatggcgaccgcgtggttcatgtaggtaaacgccgctgggtgctgaaggcgctgaagcaggaaatgacggctcacggcaccatccatgaacggcattgggatggggtgctcacccccggattgatcaacgcgcacactcatctgcagtacagcggcatggtgcaggtcgggcaaggcacctacgatcggttccgcgcctgggaactggcattcaacgaggtgtacgccgaggcgcagaagacccagccatggaagcagtgggccgaggacggcgctcgccagatggtcgaatcgggaacgacggccgccgcagacatcgtcaccgatttggacgccgccggcgcgctggcttcgcagggcatgcacggcatcgcttattgggaggtaatgggctggcacaacgccgaatggatggaaaagggccgcactgagctcatccggcagttgcgccggatgaacgaggagcagctgccaaacctcggcatcagcccgcatgctccgtatacgctggagtccgaaccgttcgttgatcttccagacattgctcgtcagctgaacatgcgactgcatatccatctggcggagaccccgctcgaggccggcacttatccgccggtgctcaccacttattcggcggccgactggagtgaccacgattgggaaagctaccggcagctcaaggaagtgggcaaaggcgcctccgccacccagttcgtcgatcagcttggctcgcttggaccggatgtgcacattgcacacggcgtgtgggccaatggcgaggatcggcgtattctacgtcagcgcggcgtgggcgtggccttgtgcccccgatcgaatcgcattaccaacaccggcaaagatgcaccggtgcgcgaatacctcgaggaaggcaatctggtaagcgtgggcaccgattcgctctccagcacgccgaccctcgatctgcttgatgatgtgtcgatgctttacgacctggcccgcgaacaaggctatgccagcgacgatctgacacatcgcctgattcgtatgatgacgctgggcggcgccgcctccatgggcatgcacgtgggccgcaaccgcattggacaaatcaacgcgggcgcattggctgatttcgcgttcttcgacatccccgtcgacacatcatctccggccggcatcgaagaaacgctggaaacactggtgaggcacggcgcaggcacgaaccgagccacggtgatatccgggcgcgaagcctacaacaacgcctggtgacaccgctgacctgacctgatatcaagaagccaaaaaccagcaaacccgccaagaacaggagatctcattatgagcgtcgctttgcaagacatgagtccatacgcccggtccatagtggaacgccttggactggaaacccaccccgaaggcggctggtacacgcgtgactggcaatccccgcacacggatgaggcctcaagccgaccgctatcgtcactgatttacttcctgctgcccgagggagatgccagcgcctggcataaggtcgatgcggatgaggtctggctgtggcatggcccggcatcggtcaaactggagctcggcggcagcgacgagactccggaatccgacgaatccaagcgaaccgtaatcaccttgggttccggcatcaccaccgatcaggccgacgtaaccgtatcgggacatgcggtcgtaccggctggcgtctggcagcgcacagtgccaggccagggcgatgcgctggtctcctgtgtggtcagtccgggattcgtattcgacggcttcacactcgaacagtgaacgccatttcgctctgcgccaatatgagatatccgtccgcttacgcgccagattgcgcggctctagtcggccataagcaatggcgatagccagcatccgaaaatatcgatgttttgtaacccaatagccatacaattggcgcgaatgcatcaagcacggtttgaaccgtgtgcatgacgaacacttgaggagaggaaacccatgttcaataagcgacacatcgtccgtaccattgcggccaccgtcagcatcctggctctgtcgttcaccgcagcctgcggttccggccagtccaccgcatccaattccaccgattcggacgacatcacccagcagacgtacaagccgggcaagctgaccatcgccaccggacagccggcctacgagccgtgggttatgaacgacaagccggaaagcggtgagggctacgaggcggccgtcgcctacgcagtggccgacaagctcggtttcaagaagagcgacgtggtgtggacccgcaccgcattcgacaccgccatcgctcccggcgccaaggactgggatttcaacatccagcagttcggcatcaccgacgagcgcaagaaggccgttgacttctcgtccagctactacaacgacagccagtccgtcgtggtcaagaaagacagcaagttcgccaacgccaccaaggtatccgatctgaaggatgcgaccgtgggcgtcatggtcggcacccttgcctacgactacgccaaggcgaacatcaaggacgacatccagacgttcaatgatgatgccgcactggctcaggcacttgacgccggtcagatcgacgcactggtcaccagcaccgtggaatgcgtgtacatggtgcagtccgagcaggtcaaggacgccaaggtgctcggccgtctgcctgactccgaagacaagagcggcatgggcatcgtgctgccgaaggattccaagctgactgcagccgtgaccaaggcagtggatgacctgaacgccgacggcaccatcaagaagcttcaggacaagtggctggccgagtacaccaccgacctgaccgaactgaagaagtaagtgaagtaggcttacatcataaggtcacaacaccttggccgggcgctgcgggaattttcctgtggcacccggccatcccggcattcaggaagcgagcgacattcatcacatgaccgcagcaccaaccgaaaccaggcagcacaatgcccctgacggacacgaggtaagtcaggtcgagctcgaacgacgccaatatcgtgttcatcagcaaattcaatcgacgattaccagtctgatcagcaccattgtgttcgtggtggtcatcgtcatcggcttgaagctctcccccggctggccacgagtcaaggagaccttcttctccggcgaatacttcgtcaaatcgtttccccatgtgcttgacggcctatggctcaacatccgcgttctgctcgtcgcagtggtcggcgtggcgattctgagcacgctgatcgcgctggtgcgcaccagccgctcccctattctgttcccgctgcgtatcctggcattgatctacacgactgtgatgcgcggcgtgcctattatcgtcgtgctgtatctaatcggtttcggcattcccggcctaggcttgttcggccgtatcgatccctcggtactcggcaccattgcagtggtaatgggatacagcgcctatgtctccgaggtgctgcgtgccggttttaacgacgtacatccttctcagcgagcctcggcccgctcgttgggcctgacctccggccagacgacccgactgatcgtcattcctcaggcattgcgcaaagtggcgcccgcactgatgaatgacttcatctccatgcaaaaggacgtcggcctgatttccgtgctgggtgcggtggatgccgtgcgcgccgcacagatcgacgtggccagcacctacaacttcacgccgtatgtggtcgccagcctgctgttcatcctgatgagcgtgccgttcatcctgctgaacgactggtacacggaacgtctgcgtaagcgcgaactcagcggaggaacggtatgagcgaaatgaccaatatcaccaccgaggcgagtgactcccccgtgagcaacaagacggtgctgcgtcttgatgacgtgcgcaaatcctttggaaacacgcaggtgctgcgtggcatttcctttgacattcaccaacatgaggtggtggctttgctggggccttccggttcaggcaaatccacattgatgaaatgcgtcaacctgcttgaacaggtcgatgacggccagatttggctgggcaataccgatatcaccgacccgcgtgccgaccaggacaagattcgcgcacgtatcggcgtggtgttccagcagttcaacctcttcccccacatgtcggtgctcaggaacgtgacccttgccgcaatcaaggttcaccactggagcaaggatcgcgccgaaacccgcgctatggaactgcttgaacgcatcggcatgcgcgataaagccagtgcctaccccgatcagctctctggcggccagcagcagcgcgtggcgattgcgcgcgcactgatgaccgacccggaactgctgctgcttgacgagatcacatccgctcttgatccgatgctggtcggcgaagtgctcaacatggttgccgagttaaaggcccaaggcaccacaatcctcatggccacgcacgaaatgagcttcgcccacgaagcggccgaccgcatcgtactgctccgtcacggcgtcatcgccgagaacggcacacccgctgaggtgatggacgagtcgcaggatcccgagaccatcgagttcttcagccatttcaggcactgagacgaagccgaaaaacaagcaccggattcatacgacgaaaggctccgacggataataccgtcggagcctttcaaattgcgttgacgaaagtcaaccgatcacgtcacaccgacaattcggtatcacgcttgagcacaaagtggagcaccaggtaatgcggcggtgaacaggtaagaggtatccatgcctccaacctacccgtcggcatcaccccacaccacaaccacccaccacaaacagcgaaaggccaaaatcctaagccactattcatacttgactgatctggtgcttaaaccgcgtccgcaaaccccaacaagttccaccaccccacaacacgcgatgtagccgccgattggtagggttgatagatagttaatcccctgtttgaaaaaggagctttggcttgtcggctgaactcgaagacattcacgaggaatgtggcatcttcggcgtatggggccaccccgacgcctcacgactcacctattttggcctgcacgcgctgcagcatcgcggtcaggaaggtgccggcatcgtctccaacgataacggtcatctcatcggtcatcgcggactcggcctgctcacccaggtgttcggcgatgagcgcgaaatcgaacgactgacgggcaattgcgccatcggccacgtgcgttacgcaacggccggctcgggcaccacggacaacatccagccgttcatcttccgcttccatgacggcgacgtggctctgtgccataacggcaacctgacgaactgcccgtcactgcgccgcaagcttgaagacgaaggcgccatcttccattcgaactccgacaccgaagtgctgatgcacttgattcgccgttcgatgcagcgcacctttatggacaagctcaaggaagcgctcaacacggtgcatggcggtttcgcctacctgctgatgaccgaagacgccatgatcggcgcactcgacccgaacggcttccgcccgctctccctcggcaagatgaagaacggcgcctacgtgctcgcctccgaaacctgcgcactggatgtcgtcggcgccgagctggtgcgtaacattcgcccgggtgaaatcgtggtggtcaacgatcacggctacaagatcgtgcagtacaccaacaacacgcagctggccatctgctcgatggagtacatctacttcgcccgcccggattccgatatctatggcgtcaacgtgcactccgcccgcaagcgcatgggcgcacgtctcgccgccgaatccccggtggaggccgatatggttatcggcgtgccgaactcctcattgtccgccgcatccggctatgcggaagcagcaggcctgcccaacgaaatgggtctaatcaaaaaccagtatgtggcccgcaccttcattcagcccacgcaagaactgcgcgagcagggtgtgcgtatgaagctctctgctgtgcgcagcgtggttaaaggcaagcgcgttatcgtcatcgatgattccatcgtgcgcggcaccacgtccaagcgcatcgtgcagctgctcaaggaagccggcgccgctgaagtgcatatgcgcatcagctccccgccgctgaagtacccctgcttctatggcattgatatctccaccaccaaggaactcatcgcagccaagatgagcgtggaggaaatccgtgaatacatcggcgcggattccttggcctacctttcgctcgacggtctggtcgaatccatcggactgaacgccgacgccccatacggtggcctgtgcgtcgcctacttcaacggcgactaccccactgcgctcgacgactacgaggccgacttcctgaagtccctcacgcccgaggaccgtgtgcgtctgcctgaattcgcgctgtacaagagcaagtacatcggcaacgagtacaacactgtgcagccggatgccgaatagctcaccaccaatccactcaataacaattctttgaaccagaggcgcttgcctcccctcagtcggctttgccgacagctcccctccagaggggagccaaaataagtagaaaggccaaccaaatgccaaaagcatatgagaacgccggcgtgagcgtcgaagccgggtacgaagtcgtcaagcgcatcaagtcgcacgtggcccgcacgaaccgccccggcgtggtcggcggcatcggcggcttcggcggcctgttcgatctggcctccttgggctacaaggagccggttctcatctccggcaccgacggcgtgggcaccaagctcatggtcgccaagctggccaataagcacgacaccatcggcatcgactgcgtggccatgtgcgtcaacgacatcgccgcccagggcgccgagccgttgttcttccttgactacatcgcctgcggcaagaacgacccggcactgcttgagcaggtcgtggccggtgtggccgacggctgtgtacaggccggttccgcgctggtcggcggcgaaaccgccgaaatgccgggcatgtacgacgaagacgaatacgatctcgccggattctcggtcggcgttgccgaaaagtccgccatcgtggacggttccaccatcgctgaaggcgacgtgctcatcggcctgccctccaccggcgtacactccaatggcttctccctggtgcgcaaggccctgttcgagcaggccggctacaccgtggacaccgaactcgacgagctgggcggcgaaaagctcggcgacgtgctgctcacccccaccaagatctacgtcaaggccctctctcccctgttcaaggcgggcgtggtcaaaggcgtggcccacatcaccggcggcggcttcatcgagaacatcccgcgcatgattccggacggcttggccgccgaaatcgagctcggcacctggcccgtgctcccgatcttcgacgtgctggagaaggctggcaacatcgatcataaggagatgtacaacatcttcaacatgggcatcggcatggtgctggccatcgaccccgctcgcaaggacgaggcgctgaagctgctcgccgacaacaacgagcccgcctacgtgctcggccagatcgcagccgacaccaccggcacgcaaatcgtactgaagtaactcgctttccgcaggaaaggaacaacatgggtcagaaagtattggttatcggctccggcgcgcgcgagcacaccattgcctacacgctgctcaaggcaccgagcatcgacgaagtcaccgtggctcccggcaacccgggcatgctcaaggacggcatccacaccacgcagctgagccagtcgaatcacgccgcacttatcgaattcgtgaagaacaatggttatgactgggtgttcgtaggcccggaagtcccgctgatcgaaggcatcgtggacgatttcgccgccgccggcatcaaggcgttcggcccgtccaaggccgccgcccagattgaaggctccaaggacttcgccaagcagctcatggaccgacacaacatcccgaccgcccaatacaagaccttcagcgatctcgagatggcgcaggactacgtacacgagcacggtgccccgattgtcatcaaggccgacggtctggcggcaggcaagggcgtgaccgtggccatggacgagcacaccgcccagcgcgcactcgaagacatcttcatcgaccatcgcttcggctccgccggtgccaaggtcgttatcgaggacttcctggacggccaggaattctccctgatgagctttgtcaacggcaccgatttctggccgatgcccatctcccaggatcacaagcgcgcccacgatggcgacgagggtccgaacaccggtggcatgggtgcctacagcccggtgccgcagattccgcagtccgtggtcgacgaggccatcgagaaaatcgtgcgccccaccgtcgaaggcatggccgaggaaggtacgccattcaccggtatcctgtacgccggtctgatcgccaccgccgacggcccgaaggtcatcgaattcaacgcccgcttcggcgacccggaaaccgaagtcgtgctcccgaagctcacctccgacctcggtgccggcatctccgccattctcgacggcgaaacccccgaattcacctgggatgagtccaacgccaccctcggcgtggtcatcgcctccaacggctacccggagaacgtcatcaagggtgcccgtgtgcccgaaatcgaagtcgacgaggattcgcacgtctactacgccggtgtcgcctctgacgagcacggtaaccttgtggccaactctggccgcgtgctgctcgtcgaaacctccgctccggacatcaagtccgcccaggacaaggtctacgcaatcatcgacaagctcgagctgcgcggactgttttaccgccacgacatcggcttcaaagccctgaagtaacagaagcggcgcatctgctgcagatttttggcccggtagccatgtcaatcgattgacgtggctaccgggccagatttttctgtcccggtagccgatttcggctctttttcgcaaaccaggacagctgaacccctcgaatataggaatatttgaaattcccttccatacgaaaccgcactattccgccattttcgtaatacgcggacgatacttccggcgtcagttttgtcccggtaagcaaaaatgacccgaaatcaaatactaggacagaaaaatctggcccggtacacgaatcaatcgattgacgtaattaccgggacagcgaacgtcactatgacaacgccatcacccaatatcagcgagcgatatcacgctagctgaatttggcgatgatgtcgaacagtttggccttggcttcattgaagggcgggtacacgaggcgcagagtgtcggggaactgcggcttggtaaccacggttttgacgtggctgaaggtgaggaagcctgctttgccgtggtaggtgccgatgccggacgcgcccacgccaccgaacggcaaccggctggacagcagatggcccaacggcagcgaatatcccaaggctccggagctggtctgacgttcgaaaggcagccgaacctcgtgatcgcgcgagaacacatatgcagccaacggccgggaccgcttgttgatgaatcggattgcggactcggcatcctcgaccaccagaatcggcagaatcggcccgaaaatctcctccttcattactggcgcatctggcgacgtaccgtacagcacggtaggcgcgatataccgggcggcacgatcgaccttgccgccgcaaacgattcgaccggccaggccgaacacgccgggcaccttgtgaatctcgctcggctcaacagcggccgaggcagtcgcaccatcatcagcggctgccatattcgaaccggccgtcggcttcgccgcattgttcgcgctgccggccatctcccccgcgccaccgcgcccagtagtcacggcattgaagcgccgcccaaccatatccatggccgcgcctaccgccgatgccacctgcaccagcggcgagctcggctcctcaggcggcacggtgccgaccggcaatagcttgcacagtcgttcaaaatgacgatcgttgataatacgaccaaaatcaggcgaggccttcggatcttcgccatagaattcggtgatggctacggcgatgcgctcggccagagcctcggccacatccggcgtggcgagcacatagtcgggtgccacgcaagtctgcccggcattggtgaatttgccccacgcaatgcggcgtgcagccacattgatgtccgcagtgcgatccacaaagcatggcgacttgccgccgagttccagcgtgaccggcgtcagatgctcggccgccgcgcgcatgacgattttgccgacgtggccgccaccggtatagaagatgtggttgaacgggcatttcagcagttcgccggtttccttgggcccgccttcgaccacgcgcacggcctcggagtcaaggtattgcggcaccaactcagcaaggagcttggacgtattcggtgaaagctcggacggtttcaagcagacggcgttaccggcagcgagcgcatcagccattggttccaaggccagcagcaccggataattccacggtgaaatgatgagcaccacgcctttgggctcggcaatcgtccatccggcagccggctgcaacatccaatgcatcgctttgggatgccgggcggtccaaaggctcagacgattgcgcacgaactgtgcttcaccagccaccaggttcagttccatgagcacggtttcagccgcgggcttgcccaagtcagccatagccgaggagacaaaggcatcacggttctccgtaaccagacggcgtagtgcgttcagctgcgcgcggcgccatgccagcggccgggtacgaccggattcgtaagtcttcttcagttgttcgaaagtctggttcgtcatgaaagcaccccctgctttacggtagcgctactgcaattttggacgggctacgccccgcgccttgctggctcgtctgtcggctcgcacgctgcctacagacagcctactaggctgtctgctttacggcagcgtcataaagtccgtgtctttgaggtagtttttgccggcggtgatgtcgtattggatgagcttgtagtcggcaagcaactgcttggtttccttgtcgaagtcatcggtgaacatcgggttgccgttctgatcaagatagatgttctggccttcggggatacgatcccagccttggatcttgttgaccacaggcggttccatggcggcgatcttggaatgcatttcggtcaggaacgccagatacgggctgaccttggcgttcatgtgatcggcggcctgcgccacgaagaagttcggcgaggagtaggctgcatcgcttgccttattgccttgggagctggaagccttattcgaccagatgaagtaatcggtcaggtgcagggccaaggagttgttgtcatcctcgctggcggacgagtagatgcccggcaagtggtcgccatagaacaccacggtgacgggcttatccagcgcatccagttcattcaggaactcctgagtggcctgatcggtaatctccacacccttttgataggtctcaatcgactgctgttcatcaccacccagcggcgtacccgtggtggattcggcggtgtagtcgttattctcataccactcgtggtagggcatgtgattctgcatggtaatgatctgaatgaacttgttcgtcttgccggacttgatgccttccaacgcagaatcataggaagacttatcagagacgtacggcgactcgtcgatcttgtcctgatacttgatcacgtccggaccggtcaacgtgtagaagtgcgagaagccgaacttcttgtagttcgtggcacgcgagtacatgctggattcgtacgggtggtagccgagcgagttgacgggcgcgccccacagctggttgatggtgggagtccaatgctggctcgggaccagctgctggtacgggctggacagggaggactcgaaattggccatgctcaggccggaaagtcccatgtattcgagattggccgtacctccgccgtagccggaggagagcatcaggccggaggtggtgcccgccttgatcttgcggatgttgggcatcgaatccttattggtcttcagtcccggcacgcggctcgggtcagagaaggattcggacaacacgtacaccactgtcgaatcagtgaggttgttggtgcgggaggcgttgattgtctccgcttccttctgatagcgagcggcgaccttcttcatggtctcctcggagtagttgctcggcttgtccatgatcttcgggttgagctggcgggtgaaggccacgagcggaccattgcgctgcgcgtcatacacggaatcccacatggatggcgtgtctcccaaggcgcgggagaacttgttggccagcgaatcggtggtgctcacatgaatgcagtacaacgcgaacaccagaatcggcagcagcagaagaatcagacgggaggtgaggttcaggctcaggttatccgtacgaatcatgcgacctttgcgcccatcgaaatgacgcagcaccagaatcagcgcgagcagtacggcgaacgcgccgagtgccacgaggatggtcacatgcgcaccggccggaatgaaggtgagcatgttgccggtgttcgagccaaggaagcctagatcggcgggcagaatggcctcgtaacggatctcgaccttgaaatgttcgatggcggccacgatgattccgaccgcgagaatcacgatgcttgccgtccagaaccggttgaacagcatcagcaacatgaggtacagcaacgcgacaagtatcacgttgagcacgaatacgaaattgccgtcggtccacatcttgctcacgaagccgaatccgacgatcggactggacagctgcacacgggtggagctggacgaaacgcccacttcgagcgccgtcacgacaatgatgtcgaagataacgaagagcacgccgtacacccagccggggaagggcttgtgggggtgttggggcgtgacttcattggcttcgacctttttggcccaaagcttgaaatggggtttcactgtggtggtattactagtgttctcgctcattcgcctgtttccttatgtgacttttcaagggcatattgttgccgctgaaccttggaaaatccatagttccactatttttcttaccgtttcctaactattcaccctaacgcaaagggtgcctcgggacatccccgaagcaccctgatatataaggagcctatccctgatagcgaagtgttctgttctcccctagacaacgcctcgctatctgacttgattattccccttatcgctgttgcggattgacggctactgccgcattacttcacggcggcggcgaactggtcgaccagtgcgctcatccagtcgagcaggttggtgtactgcttcggcatctgctcggcgagctccacgatcggcacgttggcgtccttggcggcaccggtgatctggtcaatagtggagtttgcttcctggctgttgaagacgaacatcttgatgaagccggccttcagggtgtcctggaagtccttgatgtcggccggggtcggctcgctctcgttggcggaggcctgggcgtagcccttcggagtggcgtcggtcatcttgaggtcgtcggccaggtaccaggccacggattcggtggcggcgtacggcaggccctcggtcttggcggaagtctccttgatcttggactcaagctggtcttccttggcgtgccattctttgttgagcttggcgtagtcgtccttgtggctcgggtcggccttctggtaggcggcggtgatggcgtcggcggtgttggaacgcaccttggcggagaaccagacgtgcgggttgtcgccttccttgatgccggcggtttcggcggcggtgaccagcgtggccttggtcggctgggcggccttggtggcccacgggtcgtaatcggcgccgttgactacggctaccttggcggtgccgaacttggcgacatcctggctggtgggctcgtaatcgtgcgcctcgacgttggtcttggtcatgatgttggtgacttcgacgttgctgccgccgaggtcttcggccacggaaccccactggttgatggaggcgacgacctcgatcttgccggaagacgcggcgccgctggaatcggacttgccgctggcggcgttgctggaaccgcaggcggccatcgagagcagggtcgccgcggcggccgcgatggcgagcgcgcgcttggcgttggacatgatggacatgattgggttttcctctctaattagccgaacggctgggcgatgctgctgttgctgcatcatcgcccagccaccaacacgacagaataacatgtattgagaattattatcatttgcatttacatcggcgtgtcatgctggcgttccaccctgccatcaccctggcggcgttcctgctggcctgggcgagcaccgtggtaccggcctgggtagcggccaaacgcaagctgcgtgacaagccggcttccctacttcgggcatttcatgttcatgacttcgggtggctataagcacgtgttcggcgagcagcaccagtcgaacgcctatatggtgcggctcaagaaccacgagacctccaatgtggagtcgcgcagcgccaagctcatgaagctggacggcgtgaaaggcatcgtgcagaacacgacctcaaagaaacagcatgctcggcgcgctgaagtcagtggaatagcagcggaataacaaatgggatcggctttgaagccgatcccatttgttattcgctcactgctttctgagccttctgcgctttctgctccttttggcaatcagagcacagtccgaagacctccaaggtgtgggattcaacggtgaagccgtggccgtcggccactttgcgcagccaagcctcgctgggcgggtcgatttccacggttttgccgcaccgcctgcacaccaagtggtggtgatgtccgtcgtcgccgcataggcggaacagctgctggccgtccaggcggatcgtgtcggcggcaccggcatcggccaaggcgttgagctggcggtatacggtggccaagccgattttcgagccttcgtcctccagcctgcggtgcaggtcctgagcggagatgaactcctcgcagtcggccaaggcggcgcgaatcgcgtccttctgcttggtctggcgttcgatatgttcaaccatcggtaaggtcacgccttctttttcaggtcgtcccagcagccggtggcctcaaggtcagcgaccgtcttggccgggtcgtcggtgagcacggtgatgtggcccatcttgcggtcgtggcgcacttcggccttgccgtagtcgtgcacattccactccgggtgggtggcgatcagcgcgcgcgtcggttccacatgctggccaagtacgttgaccatcacggccggcgagagcagcttgggcttgggcagaggccagccggcgatgccgcggatgtgggcgtcgaactggtccatcgagcaggcctcgatggtgtagtggccggagttgtgcgggcgcggggcgagctcgttgacgatgacctgatcgtccttggtgatgaacagttcgatggccagcgtgccagccagttcgaagcccttggccaggcgaatcgccagttcatgcgcttcgcgagccacatgttcggacacctcggcgggggcgatggtcatatgcaggatgttgttgcggtgctcgttacgcacaatcgggaaggtgacgaagtccttgccgttgccggagaccagaatcgaagcctcgaatgcgaagtcgacgaagccttccaggatgctcggcgggaagccgccaccacggtcggaacgggagcggatcttctccaagtcggcgtcggaacgcagcacgagctgaccgtggccgtcgtagccgccggacacggtcttcagcacggccggataatgaatatcatccaatgcggcgtcaagctcatcgaagttgttgacagcgcgccacggtgcggtggcggtgccgtggtcgttgatgaactgcttctcgtgcacacggtgctgggtgacgcgcagcaaatcggtgccctgcggggtggcggtgatgccgcgcacctcgtcgatggcatcggcgtccacgttctcgaactcgtaggtgagcacgtcggactgcacggccagatcatggatggcggttttgtcatcgtattcggcggtgatctggaagtcggccacctgaccggtcgggcagttcggcgtcgggtcaagcacgccgacgcggaagcccatgtagcgggcggacaaagccatcatgcggccgagctggccgccgccgatgatgccgatggtcgatcccggcatcagcatcgaaacacgaccgcctgtttcctcagacaagctgggcattggattcagccaccttttctttcagttcgttacggtaatcctcaagcttgtcggccagttcgggctcgaaggcggagagcatctgcacggcgagcaggccggcgttggtggcaccggagttgccgacggcggtggtggccaccggaatgccgccgggcatctgcacgatggacagcagcgaatcccagccggacagggcgtgggagcgcacgggcacgccgattacgggcagtgtggtctgcgcggcgatcatgcccggcaggtgggcggcaccgccggcaccggcgataatgaccttcaggccattggcgcgggcgttgtgcgcgaactcggccatgagctcgggcgtgcggtgcgcggagatgacctgcttgtggtaggcgacgccgaactggtcgagaatatcgcaggcgcgcttcatggtctcccagtcgctggccgatcccatgaccaccgcgacttcgggcttggattcatttgccattatcatttactccctagttattgagaataaggcccactgtactcctgatagcggagttaagccacacagcgaatcgttctcaatacataattctgtgaggcttacagctcaataacgatcttgccgaacatgtcgccggcgatcatcctggcgaacgcctcgggggcgcagtccaatccgtcgaccacggaatcgatcaccggatgcaggtcggcgtgctccacgaagcgcagcagccgggcgaaatcctcgcgcgaacccatggtgcagccctgcacgcgaatgtcctggaagaacagtcgcgtgagctccgcaccgggctggtcgccggtggtggcgccgcagatggcgatggtgccgccgggacgcaccgaccgcaccgaatggccccatgtggccgcccccacggactcgatcaccgcatcgaccttgcgcggcaggcgggcaccgatctccagcgcgacgttcgcgccaagtttcagcgccttggagcgcttgcccgcgtcgcgcgaggtgacgaacacctccagaccggcggcatgggcgagttggatggccgcagtggatacgccgccgcccgcgccctggatgagcacggagtcgcccggcttgatgccggcggcctcgaacagcagcgagtaggcggtcagccagctggtgccgagtgcggccgcctcggccgtggtgaggtttgcgggcttggcgaacacgttggcggacggcacggaagtcttctcggccatcgtgccggggtatttctcggagaggatcgtacggcgctcgcccggggccacgcccgccccatcggtgccgacgaacgtgtacagcaccacttcgctgccggccttgagcccatgcttgccggggatgtcctcgtccagaatgcccacggcatcggtgcccaggatcatcggcgtctgttcggcggcgagacccacaccctgtagcgaccagacgtcgtgatggtttacggtcaccgcgcgcaccgaaacggtcgaccagaacgggcgggcctggggttcgggctgctcgcccaccgccaacgcggcaagcggatcgtcatggttgacggtggatgcgtatacggccttcattgcgcgctccttggtatcaaaaggaattaccgcattcattgtcccacatcgcgcagcgaacgaatcacccatttacggagatgttgggggcattgattcgtcatgtggacctcggacaatgccgggcgttagcattcaacttcggaaagactagcgaagggagattcgagggtatgcgcaacgcgtcaggaaacggatttgattcaagcgattccttcgccgtctccggtgccgccgagggggccgcgcgccttcacgacatccccccgagcattaccccttcccatggcgacgactcccatctgctgagccgcattgccagcccggccgatgtcaaggcccttgcccccgacgagctcgccgaactgtgccgcgagattcgcgccacgctgctggcatatggccaccaacacggcggtcatatcggctccaatctgggcatggtggaggccacggtggccctgcaccgcgtcttcgactcgccgcgcgaccgcatcgtgttcgacgtgtcccaccaaagctacgtccacaagatgcttacaggacgggccggcgcgtatatggatccgaaccgtttcggcgaggtgaccggcttcaccaaccccgacgaaagcgaacacgaccagttcgtgctcgggcacaccggcacttcgatctccttggcctgcggcctggcgaaaacccgcgacatggaggggccgggcagcggcatcggcaatgtggtcgccgtgatcggggacggttcgctcagttctggcgtggcgttcgaggggctgaacaacgcggccgagcaaggcggcaacctcatcatcgtgttcaacgacaacgagatgtcgatcgccggcgatttcggcggcatgtacggcccgctcgcccgtctgcgcgcatccggcggcaccgcccagccaaacctgttcaacgcgttcggcctggattaccggtacgtggaatccggcaacgacgtcgccgcgctggtctcggccttcgaagaggtgcgcggcatcgatcatccggtggtggtccatatccacacgctgaagggtgcgggatatgacggcgccggtcacgtggccggcgcatcctcggcctcggccggtaacgtccatgagctggatccggcagtctccgacaccggcgtgcaccccaccgataacgtgaaccacagcgaaccgtggcattcggatcactgcaacctgtccgaccatgaaccacatgaaggccagtgcgaggcctcgcattggcagaatccggatgccgcaatcggcaagccggacgatccgcgcaagcattacggcaagatggcgatggcggccctcgagtcccggttcgccgacgaaccggggctggtggtcatctcccccgccacgccgggctcgaacggcatcacccatgaattccgagagcgcgcgggcgcacattatgtagacacgggcatcaccgaatcgcatgccgtggcgtacgctgccggcatcgcacgggcgggtggcacgccggtggtggccaccacggcgtccttcttccagcgcgcgtacgaccagttcttccaggagatgagcctgaaccgttcgcgagtcacggtacttgattttctgggcggcttgtccggttcggacaatacgcattccggcgcatatgacgtgacgatgttctccaatattccaggggttacgatgctggtgccgacttcggctcgcgactatctggctgatttggcatgggctaccgcgccggccggttcggcggacgcccctgctggtccggcggtgattcgggtgccgggcgaggcgattctggcggcggaacgggatgcgacgctgctgccggtgacgggtgggcagattgctgaccgcccccagtcagcttcgctgccagcctccgccagctccgccagcgggggcatatctgccgcaacagtccgcgggaccgttagcgtaacggctcagcatgccggtgcgcgtcacatgctggattggcgggtcaatcagacgggctcgcaagtcgcgatcatcggactgggcaatgcgtatccgttggcggagcagacggccgccgcattgtctgacgattatggcatcacggcaacggttatcgacccgcgccagtgcacgtcgctggattcagacgtactggagtcgttgcgtgatggccaccagcaggtcatcacccttgaagacgggcagcttgaaggcggctggggcgagaaagtgaccgcatactatgcgaatcatcatgtctcggacggcagccgtaatcctcgtgtgctgaacttcggcgcagccaaggaatttaccgaccgcgtgtcgctggacgaactgaacgaacgttatggactaacggtggagcaggtgacagaggcgatcactcgttgtttttgatggcgtctagggccgggattttaacggctttattggccgggccgaagccgaatagcaagccgatcagcgtggaaaacagcacggcgaacaggaacagccaccacggaatcaccgaataacgggtcacattctcgccaccaactatcgcctgccagagtatggtccagatagatgttccgccaccggtaccatcgccggagcccccgccggcaccgctgaccataccgccgctcatgccgccgctcatgccgcccgcatacaacgcgccgacaacgttgatgcccagcgatatcagtccgctcagcacgcagccgatcaatccgccgaagaatccgatcgcgccggcctccgcaagaaacatgacgcgaatgtcacgaacgtagcagccaagcgccttcataatgccgatctcgcgcgtgcgctcggttacggacataaccattgtgttggcgatgccgatggccgcaaccaacagcgaaaccgcaccgataccgcccagaatcagctgaatcgcgcgcgactgttcttccaacgacttacgcatgtcttcataggaggaggtctcgtagcccaacgctttgatctgtgattcgacttcgggcacggacttgaggtcggcggccttgaccagcacttgatcataggcggtggcttttttggcggcggctggatcgactttggcggccagttccttcaacgcctgcaaatccatgaccagaccgtcggaggtggcatagcccttgttgtagtcgcccgccacaatgccggaagcccgcacatcgagggtgacgttttccgactgacccgcggcgctgccgcttgcgccgcccgcgccgccaccgccgcccgcgccgcctgtgccgccgccaccgccgccgtacatgttcatgctgtactggtcgccctgataattggtgccggtggtcagactaatttgcgtggtgagcgggtcgaagaacggatcttcgtcctgatcttcctcgcactggccggtggcctggttaaacgtgcatgaggaatactgaccgccgcgtgtgctggtgcgttgttcgccgttcttcagggtgtccatgaaaccataggcgaaccattcgccggcaagcacctgatcctttttgaccggcttctcgccaccgacgagcttgtagcccatctggtcgaactgggtcatgtcgatgcccatgatctgcacgtaatcgtagaggtaacggccgcccgcgccggctctggccgtcacgttataagggaagttcatcatcggcgtcacgccggatacgccgctcatcgcgcggaaggattccacggccttgtcgtcgagcttggtatcgcccatctcggacgaaccgccaccgcccatcggaccggcataaccgttggtgtacacggtgacgatggacagatcgcccatcgatttgagcatcttctcgttctgctcgttaatgccctggcccaaagagaccatgagcacgatcgagcagcagccgacgataacgcccagcacggtcagaatcgtacgggatttacgccgccataggttttgtctgcagagccgcagtatgtcgccgaatcgcatggtcgggcctttcaggccttgtgggatgagccggctggtgcgactgatgaggctggggtgactggtgtgataggagcggtgtctgccgcagcaccatccgtcacgccggtatcggtcttatcatccttgccttcggaccaatcatcccagtcctcatcaatatcgttcttcttggccttctgcttgcgccggcgacgcaccagcagcacaatcaccacgataatgaccacggcgatcacgacgatgaccacatacaccagcaccggcaatccctgattggcgttctgttccatgttcggatcggccatgccggaatcatccatcggctgcatatcggttacgggtatggtgagcgggaattccttggtcttggtctgtccgtcggaatcctcgtacgtgactttgagcgtggtcttcagctcgcctgacgcgtgcggtgtgaaggcgtaaccaatcgtgccggtggcgccggaagccacattgcccacgtactgggttttcatcgtggcatcgaaaccttcgccctccatcgtggcctcgacgttggcgatatcgcctttgcccttgttcacatattccatcgtgaccgtgttttcctggccggcgatcacctggtcgggcactacgggatcactgatttcgaaccggtcaggctgactgatcggcacggaaatcttgacgtcagactggcttgaggagcgggcgctggcgtccacatactcgtatcggaagttcacggtcacggactgggcaccgcttttcgcggaggcgagcgcctgcatcggcacgctttgcgtcatggcgtaaccggcccacagcgcgtcgacgtagaacgtgttcgtgcctcccgcgatggcgaagctctcgccgccgtccacggtgacgaccatgttcgtcaccgccacctgccccttgttctggaaggtgaagtcgagattgaatttggatccggcggccacggaatcacctccatacgcgaagttggtgatgatgatgttgggcaccggtccggcgatcggcgcggaatcgccgtcgcttccctgagacgtactgttcgtgccgcttgtgccgtctgtgccgtcgaccgcgtacgcctgatgcggaagggagatgacggcaagtgccagtgacagcgtggagagcaacgcgacgatgatggcgatggtgtggtgggagaggtgcttcatcggtcagttccttgggttctatgggcggacggcgtggacggtgtagttggtgtggttggggcggacggcgtggacggaacagttgggcgggaaaggtcggtgttgagccgatcgctggtgatgcggccatcgagcaaggtgacaatgcggtcggcgtatgaggccatctgcggatcgtgtgtgaccagcacgatggtctggttgaagtcatgggcgaatgcgcagatcatcgtcatgacctcggttttggttttggagtcaaggttgccggtcggctcatcggcgaacaccacctcgggcttggtcacaaacgcccgggcgatgccgacgcgctgctgttggccgcccgacatctggcgcgggtaatggctgagacgatggccgagcccgactcgtttgagtacgccacgcgccgcgcgctcgcgctgttccttgggcactccgcggaacatcagcggcattgccacgttttcgagcgcggtcagattgggtagcaggttgtacgactggaatacgaagccgagatgcttctggcggaaggccgccagctcacgctcgtcgagtttgctgacgggtacgccgccgatgcgcacgccgccgcgcgtcggtttttccatgccggccaactggttgagcagcgtggatttgccggagccggattcgccgaaaatgcagcagatctggccttgcgggatactgagattgacacggtcaagcgccaccaccgtctcatcctcgacggggtattccttgcgtaggtttcttacctcgatgattgctcgcggcacgggcccttcttccttcgttcgtcgccattggcggacgcgcgatagctggttattatccagcacatctcaagtcagagtatagccgttatgcaggagccgcaccccttaagggtgttcccggatggtgatgatgagcatgtgacttctaatctcaaggtcgacagttcaggctccagacggacccagaccggcataatactcaaaagcccctggcccccacagacgatgagggaccaagggtttattgcatcgtgaccccggacgggctcgaaccgtcgaccttgagattagaagtcacatgctctatccagctgagctacggggccgaactcatgtaagtctagccgtaggggtgtaaaacacctcggcgtaacgtcggcttgcaccggtaccatcggcgatatggggacaacggagagcaacgtagatcacgccgcatcgggccagaccgtcgcaggcgatagtggtgagctcactttcacatacgcacagggtcgttttgccagtgaaggcagggattgggaaagcccggttgtgaccaacatggctgcatccgtctctgccgatgccggtaatgtccccgccggcagcatcaccaacaccggcaccaacaacaccttcaccagcaccaccgaatcgtcgcttgccgccctgctgtccaaccaatgcccgttcgttatcaaggccaccattttcgagggcaatggcaaaaacgccattcgcgaacgtcacacattcaccggctcggtgctgcgccagctcgaccaagccagcgccctgctgaacggcatcaacgaatccggccaatacccggccatagccctgcgcgaagcattggtcaacgcactggaacatcgcgattacacgtactccggccccacactgatcaatatcttcgattcccgcttggaaatcgtgtcgctcggcggcctgaccgatggtttggaaatcaacgatctactcaacggcgtatgccagccacgcaccccgcgtttggctgaattgttcgccgatttgggcctctgcgagaactgcggtaccggcattcaacgcattatggacgcctacgcgcagagcgcggtcagtccgcaactgcgcgtgggccccacttcggtggcaatggtactgcctatcccggtctcggccgaggccgcgtcctcgcatcggaccgatgccgatgcttccgccgcgcccagcaccactgacgaagcacagcatgccaaaatgtactcattccccacgattcagcgcatgacggataacgccgcagatgctttggccggcgcacgcatcatcggctgcgcgccactgcagacgctgattctcggcagtggattcggcgaacgcccggacggtgacgatcaggccagtacccgcccgcttgatacggcaacgctggaaccgtcgcctcaaacgttggaacagttcacgctcaatttcctcgcgttccgcggtgtgaagctcagccgtaaaaccatgcagaaagcgcttggcctgaacaaggatcagatgacgcagctcttggaccagctggagttgagcggcaagatcgaacgtcatacgcacgccaagtccactacgtattcgctggcacatgcctcaggacggtagcgaccagggcgacaacgaccaaatcgtcaacaacccaagcagcaacgaccagagcaatacggcccaaggcgcgataaagcagcagctcagttctcgaatacgcggtcgtgaatcatgcgaccggattcgtcgagcgcggtggagaaccggccatagccggacagaatcacgcccatgtacagcatgtccacgagcgcggtatcggccacgcgcgagaaaatcgcattgccatagatcgtgtgcgaatcacgacccgtcagcaacgtcacgtcggcccagctggccagcggcgcgccgatggcattggttatggcgatggttttcgcgccatgcgacttcgccaatcgcaacgctttgaccgtatccgccgaactgcccgaatgggagaaggcgacggccacagcgccgtggggcaggtgcccggcaccgatctgctgcaggtaagcgtcggtattgagacggcatgtcagtcccaggtagccgagcttggtgaacagatccatcgccggtgtcaacgaattctccacgccgaaaatgtcgatgaactccgattcggcgagtagggcgaccgccttgcgataggccttggggtccaacgcactgtgcagctcgtcgatcagcgccttcgcgccatcggccgctttaccgggaatctcatcttcgccatcccacggattcagatcgaatccggccagcggattgaaggtcactttgtgttcggcggccgggttgcgcaacacgtaccgcagttcacggtaaccgccgaagccgagcttgcgggcgaaccgaatcaccgtcggctggctgacgtgggcgatgtcggccatctgaccgacggtcaggtcggccgcctcctcgatatgattccgaatatactgggccacggcgcgctccgccggacgcagcgacggatacacgtggtcgatgcgctcacgtattcccaccgaggattgcacagccgcgctcctagtcgtccgtattttctattcctgtttcgaggttaccggctgtataccggcgaacagtcgacttggattgaccgcaacatgaacggtgagcgaactcttccgtttacctttccgctccattccctctacaatcgaaaccatggtgcggattagcgtgggaagccccacccatcacacaagcgggcgactgtacggcgtgttcttcgaggacatcaaccatggtgcggatggcgggctgaacgccaacatggtgaacaactacagttttgacggcgtttatctcgaccatcacacgtggcgtatggccggtgccgaacggtggcgtacgcaggctgattccctgcgtttctgggatttcatcaactgttccgccgccagccttggcagtgagatacgcgggattcacggccagcgggtgaccaccgactgccccgccccgccaattcacgcacatagccgatacgctcgcatcacgtccgatgttccttccgaaaccggccctgcatatctggaaaacctcggctataacggaggcggcgacaacgggggcgagcccgcgttctccatcgtcgccgaccacacctattccgtcagtctcgcggtacgtccggttcatgggcgggccgagctgtccgtcggcgtggtcgataggtacggcctgccgctcaccagtatcactcgattgtcgtatatcgtggactccgatccgcttgacgatacggaagagaccggtctgaggcaggacgatggggccgatgcgcaggattccggcgtttcgatcagtccggattcgtcggatggtgccatcgccatcggccgtgacggctggtaccggttcaacgccgacgtaaccggactgaacaccgattacggcaagctgcgtatcaccattgacgccggcgaacgcaccacgttcgatctggatctggtgcagttcatggatgcggactattggggcgcgggcgacccgaaatggcgttacggcaagctgcgccgcgatttggtggagaccattcaggcgttgcatccagcgtttctgcgattccccggcggctgcatcgtcgaaggtgtgacgcccggcaatgagtatcgctggaaggataccgtcggctctctggccgcgcgacgccaacagtattcgatgtggtcgttcaagatgccggatggttccagctattcgcagagctatcagatcggtttctacgaatatttctgcctgtgcgaggacctcaaggccaagccgctgcctactctgttcgccggcatcgcatgccagtcgcccggccgagatccgcgccacatggatatcaattcggccaccttccgcaacaatgtgattcaggactacctggacctcatcgaattcgcgaatggcgatccggagtccagctcgtgggccgcggtccggcgtgatatgggccatcctgagccgttcggcctggacatgatcggcgtgggcaacgaaaacttcggggctgactacgtggccaagtttgacatgatcagcgaggccattcatgaacgatacccggatatgctgtgtgtgatgagcgccggactgttccccttccagccggcgatgaagcgcagctgggaccatgcgcgagcgttggccgcaaccgattccggggcacatgattccgccaccggtgacgcgattatcgtcgacgagcattcctaccactcccccgaatggtttgcatcccaggcgtcacgattcgacgcttacccgcgttgtggcgccggcgtctatttcggcgaatattcagccaacggctattttgccggccaaccacagaccgaacaaggcgcgaacacgtggaagtcggcgctcggcgaggccgcgttcctgaccggctgcgagcgcaattccgacgtggtgcgcatgacctcctatgcgccgctgctcgcgcatattccggctaaggggtgggcgcagaatcttatcgaattcaatccggcgcatgtgaaccccacggtgaattatgaggtggagcggctgttttccacgcatctgggcgacacgacgtatgccgtgtccatcgagcagaccgcgtcacgccccgccaaacatctgtatgtcagcgccaccgggcatgacagggatgacgcctgccgttacatcaaaatcgtcaatatctccgattccccggtggatgtgacgttggaaatcgcgcgcggactggccgggctgggcgcctcgccatcgcgaccggtgcgtttggaggtgacgacgttaagcgccaatccgacggcgaagaccactatcggataccgcggcgaggcttcgggggcgattgtgccggaacgtcgggcttacacattgccgtcgccgtcttcattgctggcgatgaagatcaagccgtacagcgtcacgctggtggcttcgcgctgattggcatcggccattaggccgattcctttgccgttagaatcaccctcaaggatgagggggaatcgtgcagattcagggaataataggggctatcccccatagcgaatacaagcacgggagggcaggatggaaaccacggcggccagaagaccgccggccaacgatgaaggagtatgcggtatgtttatcaatctgttccgcaggcagcgccctgcgctcgcccggctggcccgcaactccaacgcctatcgtcagccgatggttgcggccgtatcatcgtccgcagtcggcgtatccagcatcacctctgcagccaacacagccaacacagacggcgtatccggcgtatccacgctggatgccaccatcggccgcatccacgacatcccgcagtcggccatgagccgactgaccggctcccccaccgtatacgcgcggtagaccggcccaacccacaacggcggctcagagactcggctcgatgatccagctcaaggtcagcaatacggccaaaaacagaacgttgacggcggagtagacggccagataccggcctttcttgtgcgggtattggcgcacgacgttcttgtaagaaataagcgaggccatcgaggcgatgagcgtacccatgccgcccaaattggtgccaatgatcagatcgcgccattggtcgcagaagccggaaagcagaatcgtggtgggcacattgctgatgacctggctggagccgaccgccacctccagcggatggccgccgaccagcgagcgcgccagttcgtagaattcgggcacgcgcttcatgttgccgatgaagatgaagaacatgcagaaggtgagcggcagtccccaatccacgtatttgaatacgcgccgatcggtgaacaggaacacgacgaccacgatcacgcacatcacccacaggggaatcacgtcggagacggccagtaggcagacgatgaacagcagcgagtagacgatggtgcgccagccgccataaccggcgccgtagccggtgatacgaatctcgtcgggctggtgtttgttgcgctcgggagccagcacgccggtttcgaggtcgcccaggtcgccgaccggtttgccgccaaacaccacggaaatcacgatgaccagcaacacggccgccgtgccggaatacggtgccatgatgccgaggaattccatggtcggcatgccggtcagggctttgagatacaggttgtgcgcgttgccgatcggggtgagcatactgcccacgttcgcgccaatggtcatcagcgtgaccacgaggatggtcttatcctcttgcccagccatgatgagcacggccaccgcgaacggcacaaacgtgaccagcgcaacgtcattggtgatgaacatcgcggaaaagaacgtcaaagcgacaagcgtaatgaccagtccgcgcatggtgctgaccttctccagcaatcgcgaaccgatgatgcggaacacgccgatacgctggaatccgcacaccacaatcatcaggcagatgagctggctgatggtgctggcgtgaatgtagcttttgtaatcggcgtccggcggcacaatgaaacacgaaatcagggcgagtattgcggcgacgatgagaatcgtctcatttttggctacattgatcagccagcgtcgcatccattcctccgtgaataacccaatatcgcaaccattctattttacgcgcagaccagcataaggtacgtagtcgcgttgcgctggcggacatgagtttttggaccggtgccgcacatcagccgcgctcgtttttttatttggacaaggaaacattgagtttgcatgtcttccatacaatgaactgccgcgcaatgctgtgcccgtatatacggctgcatcattgtgtggcaggccagacacgaataccgtacgtggctggctcataccaatggaacatagtttcattcgaggaagaggagcgatgaagttgcgtattaccccagtattcccggtcaaacgtttcgccgccgtgtctgcacagaacgtgaagaacgtgcagttcgattacacgaacatgcccacgtacaacacgatcaccaagtagcgcgcactgccgcactgatcggcggcacttgccgcatacatgaatggccggtgtgctgcggattccttaccaagaatccgcagcacaccggccattatgatatatgccgcaatacagggggcaatcagccctgcaccttacctccttgcgcgctacggtatccgaagttcatcatctcgctgttgtaggcgaccacgccacggccgaccgccggcagaacgatcatgccgccatcgccatgatgcgcggcgacttcgtccaaagtggccgtcgcggcatcctcgacgttctcgccggagaaacgcacacgatccgacacctgatgggcggcgaccaccttgatgaacgcctcgccgatgccggtgcaggacaccgccaccgtggactggttggcgaacgtgccgcaaccaggcagcggcgaatcacccacacgaccgtgcatctggttggtgatgccgccagtggacgtgccagcggcgatattgccctcggcatcgcgcgccacggcaccgatggtgccatgcttctcccactcatcgccaccggactgagcctcggccaaggactgacgacgctgttcggtgatgaagtactcgttgctttcggtcgcgacgccccaatcggcgatctcggcatcggtcgggtccgcgaacagcacatgcttggtctgctctttgacggcacgcgccgcatcgatcgggttcttcacggtgcttacgccggtgaccgcaccgacctcgccatcgccggtcatcaggcaggcgtccatctgggcgatgccatcgctggtcagggcggcaccacggccggcgttgaattcgggagcgtcttccatgacgtggatggcggcgaccacagcctcatgcgccggtgctccggattccaacaactggtatccggcatcgagggcgcgctgcagatcaagttcgacctgggcgatgcgttcaggcgtgctgtgcttgccacgactgcccgctccggcgtgaatgacaagcgtgatgccggtttcgctgcccgccagttcagtggtcaccggcgaaacggaggatgtggtcatatcgtgtccctttctggagtcagatggatgtgctgacgccaacgtatcgttgcttccgcatgtatgatagccgttgatggccgcgaccggttccgcatttcgcatcatcggctcgcgatggcgtgactcgttactgcgccacctcgccactacgccaggggcaatgcgatgccggctcgatcggccaggtcacgcaacgaccacgtggtctgccccgttcgcccgacaacgctatgcgcatgccacagcgaactgatgatggcttcctcgcttattcattcgtcgaatgcacccatcgatgtgggtatgcagccatcaaaaaaactcgacaaccgcaatgagccagtcacttggctacatctgtgctatcgtctcgccaatgattcgaatgccggtatcaatgtcagcagcatccgggcgcacaaagttgagacggatgtgggaatcatccatttcgtcaacgtcgaacacgctgcccggcatgaacgtgacgccttgggaacggcaggattccaatacatccagagagcgcacgccgtccggtaaggaaacccaaatatagtagccgcctgcaggcacggtccaatacacttcatccggcgcataccgctccaatgctgcgattgctgcatctcgtcgaatgcggtaagccttaatcaaaccgcgcaaatgttcggcgacgcggccttctttaagcagttccaggcagatgcgctgcgatgacgtgctcgtatgctggtcgaccatgcgccgcagagccgccagccggttaatcacatgcgggtcggccacaacccatcccgtgcgcaggcccgaagtgacggttttcgagaacgtcgacaaatacatcacgtatcccgcattctccatgcccttaagcggtatggggcgatgtgcgtcggacgattccccgccgtaccacaaatcgccgtaagcatcgtcttccacgatcagacactgatagcgccgcgccacgtcgatgagttcgctgcgtcgttcgggcggcagcgtggtaccggtggggttttggaacgtcgggacggtgtagatgagcttgggccggaatcgcgcgcaatagccgtccaacaggtctgtacgcataccgtgctcgtccactggaacgccgatgatgcgcgcatccgccgagcggaaggtctgcaatgccgggaagaacgtggattgttcgaccagcacgcagtcgccaggattgacgaatgcacgcacgataagatcgatgccttgctcggaaccggaaagcaccatcacgtttcgtacatcgcactgcacgccgcgtgtgctcatatgctcggcaagtaatgcgcggagttcatcgaatccttcgataggcgattctggctgaccgtcgaattcgcgcgactcaaacgcttcaatgctcactgaacgcaacaaatcgtcgggaatatccgccggattaggcgagccggtggcaaagtcgatgatggtatcgccgcgttgcgcccgctcggccgaggcaatgtcgtggtaggtgaatcggttggaatagtcggagaacaacaccgaccacggcggccgcacaacgctcggtttcggctcctcgtcaatcggctcatgtctcactacaggaatccgggcagtctcaatatgctgcaacggcagcacgaacgtgcctttgcctactttggaggcgatgagtccctcatctttgagttgctgataggcctgtaataccgtggtgcgattgacctcgaggcgtgaggccaactcgcgttcaggcggcagacgatagccctcagccattgcgccggagacaatctgttcacgcagctcagcagccagctgccggtacatcggcaccgtgctgcgccggttcagcgtgaactgcatggcagatcgtctccttgattcgtcggtcgaataccagtctaacggcagacgaatcggctacagcgacaggaagagctcgtggatgcggacgtcgtccgtgagttcgggatggaaggcggtggcgaggatgttgccttggcgcaggcccaccacgtgaccatcgacttcggtttcgaccgtagcctcggggccgaccgacaccacgtagggtccacggatgaacaccagcggaaagtccgcgatgcgctgtgggtcgtcggcttggccgaaatcagcgatggcttggaagctgccgagctgacgaccgtaagcattgcggcgcactacagcgtcgagcgcgccgaagtagacgttctcatcattgtcgagcttcttggccagcagaatcatgccagcgcaggtgccaagcaccggtttgccggccttgatgtgggcggcgatcggctcgaacaggccggtggaacgcaggagtttgccttgcgtggtggattcaccgccaggcaggatgacccggtcgatggattcatcgaaatcctcggccgcgcgcaacagcttccacggggcgccgagtttgtcgagcaccgccgcatgttcggcgaacgcgccctgcacggccagaataccggtcacgccgtgcgtggcggtttcggcgtctgcggattcttctttggaaatgtattcaacagctacaaccatgttgtcctctccggcttcgactcccgtcactctccgcgagcggccatgatggtctgaatctcgtcctcgttgataccgaccatggcttcgcctaggttttcggacagcttggcgagcagatcggcgtcctgccagttggcggtggccttgacgatggcggcggcgcgcttggccggatcgccggacttgaagataccggagcccacgaacacgccttcggcaccgagttccatcatcagggcggcgtcggccggggtggccacaccaccggcggcgaagttcacgacgggcagacggccgttgtcgtgcacgtacttggccagatcgtagggcacggccagctgcttggcggcctcgtagacctcgtcgtcgcgcaggccgacaagttcgcggatctgcttgttcatggtgcgcatgtggcgcacggcctgaatcacgtcgccggtgccgggctcgcccttggtgcgaatcatggctgcaccctcggcgatgcggcgcagcgcctcgcccaggttcttcgcaccgcacacaaacggcacatcgaactggttcttgtcgatgtggtacacgtcgtcggccggggaaagcacctcggattcgtcgatgtaatcgatttcgatggcctgcagaatgcgggcctcggcgatgtgtccgatacgcaccttggccataaccggaatggacacggcttcctggatgcccttgatcatggccgggtcgctcatgcgggaaacgccgccggcggcacggatgtcggcggggatgcgctcgagcgccatcaccgcgcaggcaccagcgtcctgagcgatcttcgcctgctcgggcgtggtgacgtccatgatcacgccgcccttgagcatctgggccagattacggttgagttccgcacgattctgcgtcatgagtttcccttcgttcgacgctgcttggtatcgcgcttcattattgaacggagtggattggccccacccaaaccagtccaatttggatggggccaattcgcaacttctgcacccatccaatccaacctccacatgtttatctctcccatttggcatgtaatccctgattgtcaatcaatcacaggccaggaggagaagagttggcatgcgtgcgattacttgctattcgcatcgtccgcatcgcccgaaatgccatccacatattcaagaatgtcgccgggctggcaatccaatgccgcacagatggcggcgagggcggaaaagcggatggcggaaacgcgattgtttttgattttggaaaggttcacgttggtgatgcccacctgatcggccagccagttgagtgagcggcctcgctcgaccatgatgcggtcgaggcgcaggacgatatggcctatgccggccggaccggtggagtttgagtcagccgtattcaggccggtctcgctcgaatcaacgatgttcaggctgtcctcattcgggccctcggtgttcggaccggccctgttcggaccggcgccacgcgggcctacggcgctcttccccctcacagcagaccgtcgacttcccgttgcagacccatgccataatcgaagatgcgcgcaatcagcaacaggataatgccaatcatcaccatcatgccgctcatccataagccccagttgccgcccgtgccagccaggaaacatacgatgaagttcaccagacccacaatcggcgcgacaatcagataccagccagccctgttcaaccggtcggacaccatgccttggaaaggcgtggcatccctgccgtctgcaagccacaccgtcaaatccttgcacagtgcggccatttcggagaacgccaaggccagtagagcgtagaccaccattctcgccagaccggtggagatggtagctaccatgttgacgggaccgtcgtggaagttctgcagattataggagtagtccaacaagtcgcccttgatgctgagggtgaacgcgccgccgacattcaggtcgacactgccgaagttcgcggcgaacgagcgcggggaaatgaggaataccacccacaccacggccgcgagcgctgcgatgatccataggagcgcggcaccgatgcgggccaggatcaaggccgcgccaccggccttatccaaaccgaaggatagtttctttgtcgttgccatgattgagcctccgcttcattgcgcaaaccaagcaactcatacttgcattataccataatttatcgtttgtcattaaaaagttaatatcaaacgaatagttgatgtgacatcgatgctgcgcgatatatctgacgtcgcttctctcgccccgcccgactgcggccagtaacctccctcgtcagagggagagattactagccaacggtgttgccatagatttgggcttggagatctttgcgagcagtctccatacgggtgatttggccgaggagggtgattttctcctcgccatccggcagttgggccatgcggcgtttggccaaaccgatctggcgcatgaagcccatgtccaacaatcgggtgagaagctcagtggcgtagcgctgctcctccggcgtggcaggacgcagctgtactgcggcggcaccgccattcacgccaacacctcctcccgacacgttggcctgcaccggctgcgcaccgctaccggtgtcgtcgccaggcagtggcaacggcatgacggccagctcgttgatcacctgattgagcatcggtccgccggccttggtgaggttgtgcatccacagcccctgcggggtatcgtcggatggcagtccgccagctgccgcaatcgcttggaacaaagtgcggaacaccggagtcatgaaatggtcgatggtcagctgcccgaacatggtgcggtcgatggcgcgcggcacctgaatcagcacggccatgaactgctgttcggcgatgaatacggcgtcgtcgatcttgaagtacgcctgttcggcggcgtcacggcgctccaacgccttgcgcgtggccggattggcgtatgggttggtgccgggttccacacgcggctcgtcacgctcgaatcgacgtttgggcgcgtaggcgtcctcatcgcgcacgtgcatctgccggcgcgcgttcatcacctcgcggcgcattacctcaaggtccacgccgatacggcctgcggatttgcgcgcgtaagcgtcccatagggagcggtcgcgaatctgcgccaccagcggggccacggctttcatcgcaccgacctggccgggcgtgtaggtcaggtcgaaccggctgatggcggcgtcgatcacgaagtcatacaacggtttggcgcgggcgatcagcgaacgcactgcttcgttgcctcgctcgatgcgcaggtcgcacgggtcgagattgtcgtcggccacggccacgaaggtttgggagaggaaggccgaatcgaggccgaaagcgtgcagcgcggctttctggccggcggcgtcaccgtcgaacgtgaacacgatgcgcgagctcaacggctggtccttgaccttcaacggcccgaccagctggaccgcgcccagcgaatcgtcggcgatcaggcggcgcacgatcttggcgtgctcggcgccgaatgcggtaccacacgtagcaatggcggtgtcgataccggccaagtgcatggccatcacgtccgtatagccttcgacgatcaccacctgtcgcttcttgacgatggcggatttggccaaatcgatgccgtagagcacctgggttttgcggtagagctgcgtgtccggcgtgttgatgtatttggcggcgatctgatcgtcttcgtatagtttgcgcgcgccgaagccgagcgtgcggccggtcgaatcgcggatgggccacgtcacgcggccgcggaaataatcgtagatgccacgctggccttgacgggccagaccggcgtcgaggatttccttttgtgtgaagcctttgttggccaagtgacgtacgagattatcccaaccttggggcgcgtagccgcagccgaagcgttcacagtcggcttgggagaagttgcggcctccgagcagcttgcgggcgggcagtgcttccttggtcaggatctgggagacgaagaagcgttgggcttcctcgcaggcttccagcagtcgggtgcgcttggagccggcgttttcgcggttcggcccgttgccgctgttctcgtagtgcagttcgatatggtacttgtcggcgagcagttccacggcttcgcggaagtcgatgttttcggattgttcgacgtatttgaatacgtcgccacccaagccgcagccgaagcagtgccacacgccgagtgaggggcgcacgttgaagctgccggttttctcgtcgtggaacgggcacaggcctacgaaggtgccggtgccggagggcttaagcgttacggtcgcagatacaatgtcatacaggtccgcggcggcgcgcaccttctcgacatcttctttcttaatcattccgaccataagtctctagagtaccgcctcacctgagacacggtaaatttttaccgtcggttatcatttcttccgcgaaactcccttcagtcgcctacagcgacagctcccctcacccgaggggagctggctcgcgcagcgagactgagggaagcgcccgtccaacacgccctcagcacaagatggagtgcagggccagagcggagttgtcggtcaggcttgcgacctgatcgatggcgacgcgcaggcgctcgtcgtcgttggtggattcattccaatcggccaggaactggctttccaaagcgtcggatgggagcggcgaatcagccataagcacatcgaccaaatccgatacgatcttgagctcctcctgatggaatggctcgcgctcgcgaggcgccatgacgaagtacacggcgatgcccttcagcgccacgatctcgtaattcgtgttctcgggaatcacgatgttcgaggaataccgggtcaacggcccgggcccatacgtgtcgcgcgtggcggtttccaccgaccagcagaagcggccgatcaaatcggacgtgatgttcttaagctgcgccaacgattcgcgcgaaccattgaaatatgcagggaacaaatactctcggcgcaatcgcatgaacgcggccagcagcttgtcggcatcccacttcgccccataccatgcgcgcgtctgctcgatgatgtggtccagcatcttcggatcggcgagcacaatcggatcgaacgcgccggtggcgatggaatcctcgacgtcatgcacggagtaggcgatatcatccgaaaggtccatgatctggcattccatgggtttggtagcctgaggcgcgccgattttgagccagcggaacaccggttcgtcatccgggtagacgcagaatttcttcgaccgctcccccttcgggtgtcggtcggcttcggccaaggtccacgggtatttgacggccgcatccaaggccgcacgggtcaggttcacgccggccgaacgcccgtccgggtgaaagatcttgggttcgagccgggtcaggatacgcatggtctgtgcgttgccctcgaagccgccgatattgccggcgatgtcggcgagcgcacgctccccattgtgcccgaacggcgggtgaccaaggtcgtgggccagacaggcgcagtcgaccacgtccggatcacagccgagcaatgcgccgatttggcgaccgatctgggcgacttccagcgtatgcgtcagtcgagtgcgagcgaaatcgtcggtaccggcaatcagaatctggcttttcgcgcccaaacgccgcaaagcggacgaatgaatcagtcgcgcgcgatcgcgctcgaacgcggtgcgtgacttggatttgggcggctcgggtgcccaccgctcctcgtcgaaggcgctgtagccctcatcgctcagcacctgttccccatccaaagtcgtttccatattccaagcataggcacacatatcggccgcagtaatcccgacttcccgaatatgtgccactgacgtcaactcaacggcacatattcgggagattggggccgatttcccgaatatgtgacgctcagcacatatcagtggcacatattcgggaagaagggattacggggtgccaccgtatggcggtaatgcaccttatagcagcgtggcggggtcgagcttggcgaggtcggcggcgggcagcacttcggcggcatgctcgtaaaggcgcgggatgcggttgcgcaggcaggtgaagatctcgtagctgatggtgtcggcggcgcgggcccaatcgtcggcggtaggctcaacgtaatcctcgccgcggcccgggccgaacagttcgaccgtgtcgccctcgtgaacgccgagttcggcggcggatccgtgcaggtccacgatgaactggtccatgcacacgcggccgcacacgcggtagagcttcggaccttcagtggtcatgatgcgcaccgggccgcccggcttctccacgtgcttggcaccttccatatcgaaaccggaagcggagcggtggatgccatcggcgtagcccagcggcacaatagcggtcgaggtgttgtccggggtcaggtaggtgcggccgtaggagatgccgtggccggcctccacatccttgaccgtgccgagctgcgcctgcaggcgcatggccggggtcagatgccagtcgcgcggggtgcccatcgcgggatcgggctcgtagccgtacaggccgatgccggggcgggtgagttcgaagtgaatctccgggcggtccaaagtggccgccgtgttggccaggtgacggatctccggcggaatgccggcctgttccatgcggcgcgtgaagtccttgaatgtttcgatctggcggtcggtggaggacacgaattcgggcacatcgggcgaatcggccacggcgagatggctccactgacccacaatatgcaacacgccctctttggcgagcggcacgagtttggcgagcgcggcgtcgaatccggccggcgtgaaaccgttgcgaccgaagccggaatcgaccttgacgtgtacgcgggcgggcttgccgagcttgcgtgcggcggcggccaccgcgtcgatgccgggcagggagccgaccgatacgtcgatgtcggcggcgatcagctcgtcgaacgggacttcggtgccgttgtatacccaagtcaaaatatggcagcggtcggggccgatgccgagcttgcgcagcagcaacgcttcgtgcgactgcgcggtgccgagccatgtggcgccgccggcgagcgcggccagggcggcgggcagcagtccgtggccgtaggcgtcggccttgaccacacccatcaccgccgtgccggaagcgggcccgccgaccacggagaccaggtgggccatgttgtcgcgcatggttttgaggtccacgatggcctgtgcggggtattggcggcgggcggccgcatagttggccttgccctgctcggacgagaatgcgatttcaggtgctgcgttcatgctcatagacacctattgttgcgcgagaatgtgacgtgtagtcgcaatcgtctgtttttcgcccggcagtcgtacactaatgaccgatatgcggtttctcggaagccgcctttgattcccggcgttgaggcgtgccgggatcccggaaatccgtccggttcagccccataatcctagatttcatgagagaagaacatggatctgtttcgtaagaaaagcgtggatcagcttgtcgccgaatccactcccctcaagcgcacgatgcgcaccttcgatctgacgatgctcggcatcggcgcgatcatcggcaccggtatcttcgtgctcactggcaagggcgcgctgaccgccggcccggccctgtccgtatcgttcctgctggccgccgtctgctgcggttttgccggtctgtgctacgccgagttcgccgccatggccccggtgtccggctcggcctactcctatgcctatctggcgttcggcgagctcatcgccttcgtgatcggctgggatctgattctggagtacgccctgcaggcggccacagtgtccgccggctggtcgggctacttcaacaaactgctggaaggcttcggcctgcacctgccggtcgagctgaccgccgcctacggcaccaacccggacgtcaccacctacttcaacctgcccggtttcgtcatcgtgctcatcatcacgtgggtgctctccatcggcatcaaccagaccaagcgcaccaatgacgtgatggtgctcatcaagctcgccatcatcgtgctgttcatcgtgtgcgccgtgtggtatgtcaagccgtccaactggcagccgttctccccgtacggcatctacactttccagcccggctccacccagccgtacggcatcgtgccggccgcttccatcgtgttcttcagcttcatcggcttcgatgccgtgtcctcttccgctgaggagaccatcaacccgaacaagacgctgccgcgcggcattctgctgtccctggccgtttccaccgtgctctacgtcatcatgaccctgatcatgaccggcgtggtgccctacaaggagttcgccaagtacatcgacgccccggtggccggcgtgattctggagaccggcatgaactggctcgcggtgatcgtgaacctgggcgccctcatcggcatgaccacggtgatgctcgtgcagctgtacggccaatcccgtatctgctacgccatgagccgtgacggcctgttcccgaagttcttcggccacgtgcacgagaagtaccgtaccccgttcaagggcacctggttcttcggtctgctgaccgcgttcgccggcggcttcatcaacatcaacgtgctgttcgagctggtgaacatcggtacgctgtccgcgttcatcatcgtgtcggccggtattctatggatgcgcaagacccagccgaatgcgccccgcggcttccgtgcgccgggcgtgccggtcaccccgattctggccatcgtattctgcttcgtgctcatcgccggtctcaactgggagacctgggtgcgtttcgccgtctggttcggtctgggcctgatcgtgtacttcggctacagccgcaagcgctccaagctcggccttgagcagaaggccggggctgacgccaaggtcgctgcgactgaggactgaggactaaggtctatcggctgaccgatagccgatggctgctttcgtgaaaaccgtacgctgagttactttcagcgtacggtttttgcgatatgcacgagtttgaacgggcggccgacggaccgtacgtgcgcgacgacgtggaccttacctgaccagctccaccgcggaaccgaacacgctggcgacagccacactcaccactcgtggcgctgataggcgattctggtggtgtcgaccggccggtcgagcagctggatcaggccgcaacgggcgaagccggagctttcgagcacgtgctgcatggccttgttattggggtgggtgtcggcgcgcacgttgccgtagtgcttcagggcccacctgatacagtcgcgggccgcgtggcgcaccagaccggatgcggcgatgcggtggatggtcacataggcgtcgttgtccagccaggcgccgtcgattttggcgtaggtcggatcctcgcccgggcacagggcgaactgggccagaatgcgttcgtggccattgcaggtgtcgaccagcagcatcgtacgctggttggcgatgtcgtcctcaatcatcgattcacgcggaaattcgttgccccactgggtggggttgccgttggcggccatcaacgcgcgtgcgcgtgcgtagattttctgcatctgcggcagatcgcgcatggtggcgtggcggaaacggcggcctgtcgccttgtttgcagcgttcgactgagtcacttctcacctctccgacatgccgggttgccggcacggtgaccggcgactaactgacggccaacctaccatgccgtaggcacaagaaatcccgtccgcgttgcatgacggacactaataaacaatgactcccgtccgcaggagccggacagtccagccgagttgaggacagccaccctcagtcggcttcgcccccggctcccgccagcgggagccgaatcagaattgaatcgaatcagacgaatcagacgaccttgcgctcgaacgggtcggagctgatgccttcctcaaggatctgcttggcccattccttggcggtgaacaggctgtggtcgcgatagttgccgcagctcttctcggtggtggcgggcacgtcatcccacgtggccttgtacgcgatgaactccaacgattccttcagggccttggccacttcctcggtggggtgggtgccccaggtcagcaggtggaagccggtgcggcagccgaacggcgagcagtcgatgtagcccgggatacgttcgcgcagcagcacggcgatggtgtgttcgatggtgtgcaggccgccggtggggatggcctgcttgttcggctgggtcaggcgcagatcatagttggagatcacgtcgccgtgagggcccgtttcggtgtcgatgtaacgcacgtacggcgccttgaccttggtgtgatcaagctggaatgattcgacgacgggcttttcggccgtttcttctgccatgctgttgcctttctacttgccgagtgttcggtcatgaagcatcgaacagtcatcgtagtcgagccagcccaagaacgcccgcaaatactccgcagttcgctataggagattgttatgacgcactcccggcattgaacgaggcgatggcttgcatgaagcgctggccgtagaggtcgagcttgtgttgaccgacgccgttgaccgccagaaattgcgcgttggtaaccggcttgatgcgggccatgtcgcgcaaggtcttgtcggagaacacgatgtacggcggcttgccgatttcctgggcgatggtgcgtcgcagttcgcgtagcttctggaacagcgattcctcgtcatcgtccgggatatacgagcccagcgcatcgccgggaacattggcggaatcggcagtatcagccactcccccgctccgaccggaaccggccgcctccgacttgcgttccacccgtttgatctcatagtggaagtcgggagcggcggtttcggccgcccgcgcaccgaacatgacgattggcatacgcccttcggcgattgacaggtacccgtccgtggccatctggctcaacacgtcgcgcacgcgagcctcgttcacgtccttgagcatgccgaaggtgggcatccgctccgggttcagccatgccagatcctgtgcccgcgaaccgcgcaggatcttgacgatcttgccggaaccgacgcgctgccccacgtcatgcacgcaacggctgatcgcctgcgccacgcgggtcacgtcgatggtctcgaacgtgctttcgcagttcgagcaggcaccgcatttgccggactgcgaagagtccgccgcaatgtcttcacccgccgtggaaccagcattcggcgacaattcctgaccgaaataccgggtcatataccggtgcaggcagtcggtggtgcggcagtagccgaccataccgtccagcagccggcgcttggactggcgaacggtttcctgctcttcgggagtcaatcgttcgttctcataatcgttatccagcaaccgacgccgggtgacgatgtctgactcattccacagcagcgtgcatcggctgggctcgccgtcacggcccgcgcggccggcctcctgatagtaggcctcaatggattcgggcagattgtggtggatgacgtaacgcacgttggacttatcgatgcccatgccgaaagcgttggtggccacgaccaccggcaccttgtcggtgatgaagtcgcgctgggccgcctcacgcgcgtccggcgacatgccgccatggtaggcaacggccggatgccccatctggttcagcgtgtcggtgagcgcttcggtggtcttgcgggtggcgcagtagacgatgccggattcgtccggatggtcggccacataccgcgccacccatgcggccttgtatttggtttccagtttgaccacatcaaaatacaggttcggccggtcgaatccggtaacggtgacggccggattccgcaatcccagcagtcccacgatgtcccggcgcacccgttcggtggcggtggcggtgaacgcacccaccggtggacgctgcggcagcccggcgatgaaatcgccgatacctaagtacgacgagcggaagtcctgaccccactgggagacgcagtgggcttcgtccacggcgatcagcgagatcggcgtacgggcggcaaagtcgcggaatcgcccggtttccaagcgttccggggccacgtacagcagtttgatctgcccggcggcggcttgggcgaacaccatcgcctgctcgtcgggagtttgagtggtgttgatgaacgcggccggcagaccgaggtcgttcagcgcatcgacctggtcgcgcatcagggaaatcaagggagatatgaccaaagtcatacccgggctgagcgcggcgggaatctggtagcacacggacttgcctgcgccggtgggcatcacgcccaagacatcgcgtccggcaagcaaagcctcgacaattccttgctgtccgggcctaaacgagtcatagccgaagtatcgtgtgagcgcctccagcgccgcctgatgtgctgtcataaacgaccagtgtaggccgaccgcggctggatttcagcgtataacggaatacctcgcaacgatgtacgtagcccttccgtattattatgcgtcaaggaacgttattcccggcatatcgcacgatatgccgctttgagagaactaagacggggcattttgatggccaacgatacattttccttctcctctcctgacgatcaggagacggcggtgctgcagcctgtggccaccgatgggctgttcgcatccgcggattcaggtaccgccacgccacagcaaagtgacaatggcaccaataaccatgccgataatacagcctatgtgggtgaacatgttatggcatctaccaccgctaaatcacatggcaaggccgcacggattgccatcataaccatatttgcagtgttgcttgccgcattaatagcctatttcttcgtcggacgttggtacttccaagacaaggctgcgcccggtgttcatttgggcaatgtctctgtcatgggccagacccgcgaagaacttgcgaatactgtgaagcagcggctgaataacaccacggtgacgttcaccgccgaaggcaacagcgtcaaagcctcgctgaaggaccttggcgtcaccgtcgacacggataaaaccgtggatgcgctgttgaacgcgaagaccggcgacgtggccaagctcaatattttcgatcagccgcatatcgctctgaccgccaccacggacaaagagactgccgaacaattcgtcaccgccggcctggtcgatgaggccgaccgagcgcagattgccaccgttgtctacaacaagagcaccaaacagttcgactacaccgcgggtcaggacggcaagggcccggataccaatgttgtcaatgctgcagtcaaggaggccgtcgcgaccccgggcgaaaatgcgacggtgccggtcaagctacagaccgcaaagaatccgattgatgacgcgagcgcacagcaaacacagtttgacgccaatgccaggcttggcctcaaactgaccgtagacaacggcgtgaacaagagcgtcaccatcccggccgatgccattgcctcattcctcaagcccacggtgaataaggcggaaggcaccatgagtctggtagtcgaccgcgatgccatcaccaagtacgtcaccagtgacagcgtaaccaaagaactgactgttcccaaggtgacacgcgaggtctacatcacgccgaaagacgaaggcggcgtggaaattggtgccgataagacactcggcgtggatggtattgaagtgactggcgccggggacgcccccgaacgtctggctaccgccatcgagcagaaccagtccactgattccactgtggctgtgaaagacagcccgtatgatgtcaagcaggtcgaggtgcctcataacttcgatacggcaaatggcgataagtgggttcatgttgatctgacgaaccagactgccactgcatatcagggcaccacggtggtcaagaagttcaacatcgcttctggcaagcccaccgccgatggttccatgctgtccgataccggcacgttctacgtgtatctcaagtacgaatcgcagaccatggttggcgaaggctacaaccagccaggcacgccgtggatttcctactataacggcggcgaggccctgcacggtgttcctgcatacatgtggggcgagcaccccatctatgtgcagcagggtatcccaggctcgcacggctgcatcaacatgcaggtggccgacgccaagtggatgtacgactttgccaccatcggcactcgtgtggtcgttgatggcaccacaccgacttccggtcaggcgttgcgcccggctggtgcggatgccactggatggcagggcggcaacgccagctgattcaatatgtttaatcgataacggaaaatccccgaccattgtgggccggggattttttgtaggtaccaatcgatagcgagtccgccgataagcgtggtggcaccgtcaatacggtgccaccagtaccgtcagtacggtcagatacgatccaacgcctgcttgagatcggcgataaggtcgtcggcgttctcgataccgaccgaaatacgcaccaggttggcgggcacctgcagggtggtgccggccacggaggcgtgggtcatggcggcgggcacctcgatgaggctttccacaccgccgagcgattcggccagtgtgaagatctgcgtgtggtccacgaagtgcttggccgcctcggcaccggccgcgagctgcacggagacgatgccgccgaagccgccgtgcatctggcgggcggcgatttcatgacccgggtgggactcgaggcccgggtaccagacgcgctcaatcacatcagagggctgggattcgagccattcggccaccttcagggcgttggcactgtggcgcttgacgcgcagatccagggtcttcaggccgcggatgtccagccaggagtcgaacggggagggcactgcgccggcggcgttctgcaggaaggcgaccttctcacgggtctcctcatcgttgaccaccacggcaccgccgaccacgtcggagtggccgccgatgtacttggtggtggagtagaccaccacatcggcgccatcggccagcgggtgctgaagggcgggcgaggcgaaggtgttgtcgaccgcgaccttggtgccgtacttgtgggcaacttcggcggtggccgcgatgtcggtgatgttgagcagcgggttggacggggtctcgacccacacatactggtagtgcttggaggccaatgcggtttccacggctttcagatcggtgatgtccaccacgtcgaggcccacaccccacggcacgaacaccttggagagcaggcggtaggtgccaccgtacacatcgttgccgagcaggatgttgtcgccgggcttgatggtggagcgcagcagcacgtcgatggcggccaagcccgaggagaagctcagcgcgtacttgccgccttccacggcggcgagctgctcgtcgaagctggtgcgagtggggttgatggagcgggagtagtcgtggcctcccctgaggcccaacacgccatcctgcttgaaagtggaggtggcgaagatcggcgtgacgaccgcaccggtggtcgggtcgggctcctggccggcgtggatggcgcgagtggcgatgtcggtgttggcgaacttggcgttgtattcagcggacatgatattgggttcctttcgggatcgttccgtattcgaaggtaaaacaggtgcggttagttagcgcggatgttggtattgattcttttgatagctagttatggagtccatccgcagctccctcatcagagggagttccgttaaggtactgctcggcgagggagggcttgctggtgcgttccacgatgtcgccgtagccgttggcacgcatccagtcgtcattgaagatcttctccagataactgcggccggaatcaggggcgagcaccaccacaatctggttctcgtccaaatcattggcaagcgcgtacttgatggcgctggccacggccatgccggacgagccgccgaccagcaacgcctcctcgccggccagacggcgggtcatttcaaaggcttcggcgtcggatacgcgcacgatgtcgtcggtgatgttccggtcgaaagccttggggtagaagtcctcccccgcgccctcgatgtcgtactggtggacttcgtcgcgtgaggaagcggagtagatggagccttccgggtcggagccgatgaccttgaccgcgccgttggaggcttccttgaggtacttgccggtgccggagatggtgccgccggtgccaatgccggccacgaagtgcgtgaccttgtggtccgtagcctcccagatctcggggccggtggtgtagtagtggctcagcgggccgttcgggttgtcgtactggttcgggcggaagccgccgggaatcgtgttggccagtcgttcggcgacctggtagtaggagcgcgggtcgtccgggccggcgtcggtcggtgtgacgatgacttcggcaccgtaggcgcgcagcaccgcgcgcttggattcggaaaccttgtccggcagggtgaaaatcgtgcggtagccgcgctgctgggcgaccagggccaggccgacgccggtgttgcccgaggtgggctcgacgatcacgccgccgggcttcagctggccggactgttcggcggcgtcgatgatgcgctcggcgatgcggtccttggaggagccgccggggttgaagtattcgactttgacggcgatggtggctttgacgccggccgcctgcgggatgtggttgagcttgacgagcggggtgttgccgatgagttctgcgaggctgttgtggatggtcatgtgaagtccttcgttgctggggttgtggggttttgctgcgttgcgttcgtgaaccgacgttcccagacgaatggactgtggctttggtttgaaaatcgagtattcccgctcactgtacggtgaatccgaaaagtgaatcagtttttcatgttaaccacggctcgcgcgttacacggttacgctcgtgccatcgatttcatgaaaattcatgcgacagatttgccgcgattcgaatgctctatctcaagttatgcgtcactgaccgctcgcccaggggcgtcggttagcgacaacaacatgagataatctgcatgtctcacaccatagcacaacccgcgacaagcgcgtgtcgccggcggcctcggctcccctccctgaggggagctggccgcgaagcggactgaggggaatacgacggcacccgtaactcccctcagcctcactgcgttcgacagctcccctcagagagggagccaaaaaaggtctataacgaggctgcctcgatgagctgacgggtgtaatcggattgggggttgccgagcacttcagcggtggaacccgtctcttcgagacgcccgtcatggagcacgaggatgcggtcggcgatgtgctgtaccacgccgagatcgtgggagaccatgatgatggcggtgctcggccgggccgcgcggatggcggcgaaggtgtcgaggatctgaatgcgcgcggccacgtcgatggcgctcatcggctcatcggcgaggatcactttgggctcgttgatgatagcgcgggcgatgaccacgcgctgcgcctggccgccggacaggtcgattgggtaccggttcaggaagtctgccggttcaaggcctgccatggtcagagccgcggccactcgctcgtcgatatcggtgttgttcaggtcacgccgttgcagactcagcggttcagccactgatttggcgactcgccaacgtgggtcgagcgaggagaacgggtcctggaacaccagtcccgattcgcggcgcagggccgcgaatcccggcgattttcggccgccgacaatggattggctctcgtattccacgctgccggagtccgcggattccaagcccagcataatgcgggtcagcgtggatttgccggatccggagccgccgatcacggccagacattcgccggcgtggacgtcggcggagacgtcgaagaggacttggtggcgtgcggtgcgcgggccgaaggatttggtgatggagtgggcggagaggagcggcacactgctgttactcatgcgaatcctccttgggggtgtggagggtgagggtttgggcggcggcgaccaggcgctgggcttgtggtgtggtcggcgcggcgagcaggtcggcggtgggtccggattcgacgatgcggccggcgtccagcacgtagcagcgggtggtggcacgcgcgagtacggagaaatcgtgggtgatgaacagcatggaggcaccggcgtcgtccaccagcgaggtcagcaggtccacgatctggcgttgcgtgatggagtcgagtgcggtggtgggttcgtccgcgatgatgaatcgcggtgaggtgatcagcgccgtggcgatgcccacgcgctgctgttggccgccggacagttcgtgcgggtatttgccggccatatcgagatccagcccgaccttgctcaacaaggcattcactcggtcggctcgttcggccttggtcagatcatagtgcaaccgcaatggcaaggcgatctgctgcgccacggtcatcaccgggttcagtgaggcagccggattctggaacaccgcacccacataccggccgcgcaggtcggcaagcgcacgttcggaagctccgataatttccgtgccgcccatatcaatcgacccattagtcacagcggtcaggggcagcaaccccagcatcgccttggcaatcatagattttccggagcctgaagaaccgatcaagccaactcgttcaccgtcggcaatggtcatatccgcatcagagacgattggtttgccgccaatcgtgattttcagcccgcgaacatcgacgctcatcgttcgcctcctatttcacgtaatgcggggttggtgaccggatcgatggcatcgcgcagcacatcaccaaaaatattcagcgccacaaccacaaccgtgacgatcaggccgggccacaccacggttaatgggaacacgttgatgagtttgaccgaagtggccagagaatgcccccagctcggcacaccggacggcacaccgataccgagataagtgagccccgactcagccaacaccgccgtgcccgccgacaatgacagttgcacagccaataccggcagaatattcggcataacatggcttatgagcacacgccacccgctggcaccattggccaaggccgattccacatatgacgagcgggacgccagcaacgctgcggggcgagccacacgagccagattcaacccatatccgaagccgcaggcgatcacaatcaccgcgattgacgctcccaacggcacagccagaatcaacgcaatcaacacggtgggaacggaaatcaacgcatcaactaccactaccgaagaactggcgagcgccgcattgcgcgccaccatggccgcgatgagcagcagcccccaagccatagatgccactacggtcagcagcacgatcacaagattggtatgtgagccggccagcagccagctgaacacgtccgcgccggtgccgtcagtgccgagccagtgctcggcggacggcttggcccatacatggtagccatcagtggcccacagcgattgcggggtccagaacagggaaacgatggcaatgagcaaccacagagcgagcacgataagtgcgaatttgccctcggcacgacgccacatggagtgcaggacgatgacgaaggcagcccgtcgaccaccagtcgtcgcacgacgaacattgctcatgcggtcacctccgtaatggcggtagcggttttcagacgcgggtcgagcacgcggtggagcaaatcgaccacgaggccgacagtcaaaaagaacgcggccagcaggaacagctcgctttgcacggcaatcaggtcgcggttgcccacgtcggtcacaagaccgttgccgatgcccggtaacgcaaacaggttttcgatgaccatcacgccagtgaccatcgaagcgaaggtcagcccgataacagacaccagctgcggggttgccaaccgcaatcccacacgcaacaccgcctgagtgcgcgtcatgccacacgagcatgccatatcgatgtagccggaactggctaaatcccctaaggccgcgcgcgtgtatcgcataagcgatgctcccacgatgatgccgaccgatacagccggcaataccaacgctgatatcgccgaaccgggtgcgccccagccatccagcgggaacccttgcgagggaaacacgtcaagcaatcctacgccgcgcccgaacaacagaatcagcagcagaccgccccacaacgcaggtacggcaccgccgacaatagccagtacatgaaacaccgcacgcaccgttgcgctgcgggccagtaccgccgcacagcccagcggcaagccgatggccaaggcgatgagcaggccaagaataatcaggggaaaggtgatggacgcacgtgcgcctaccaaggaggttacggagcgaccagtcaggattgaagtgccgaagtcaccacgggccagcgcactcatccaatcgaagtattgtgcaatcaatggccgattcagaccgagttgttcgcgtagctgggtcacacgctcaggcggcgagttgacgccggccatcacggaggccacatcgccaggcagaatgcgcaatgctgcgaaaaccaccacggacaggccgaacaacgccaccacgaataacgccagccgtttcaacacgaatcgcataatgcctactttacttggattaacaatgagccccctcactgagggagctcattgctgtaacgaactacttcgtgtaggtcacgttgtagaggggcagaacggtctggttgaggtcgaaggggaatccttcaacgcccttggccgtggcggtggtgatgcggtagttgaacagccagtcggccggcgcatcctcggagacaagcttggcggccgcggcgaacttggcatcacgctccttgtcggaggtggcggcaacaccctcgttgtacagcttggtcacattcttgttgtcgtaaccgaaatagtatgtcggatcggtccacgatgcgaagtcgtggctttcgttgtggtccaccagcgaaatatcgaaggtgtggttggtgtacacatcctgcagccacgtggagaactccaccacattcaccttcaggtcgatgccgatgggcttgagctgggagcgcagctggtctccgagctcggtgccgtagatgttggcgtaggtcagcgtaagttgaagcggcttgtcggtggaatagccggcttcagccatgagcgacttggccttgttctgatcatacgggtacagattcgtcagatcctcgtagccggggtcgagagacgggatcgggccgccgagcgccttgtccgcaccgccgcgagaggcgatgagctccttgtggttgatggcgtaacggatggcctggcgaatgcgcttgtcagccagtttggaaccggaagcgttgttgaagccgagcacgaacttgtcggtgccgttgccggctttgaccgtgtacttggcggaatcggacttgaacggttcggcgaggttctcggtaatcggggcgagcacctgcacgtcaccggacttcagcgcattgaccgcggcgttgtcgtcggccagatacttgacgaccacggtgggcgtcttggccttgttcttgccccagtacttctcattggccttcagcgtgatcgagctgttttccacgaacttggcaacggtgtaggggccggagccgacggcctgcgtcttcaggtcatacttggcgtccttgtcgaacacgagccctgcgcgaccggtcagggtccacaacaggttggagttcggcgtcttgagcgtgatcaccgcggtgtcggcgtccttggcctccaccttgctgacggcggcgagcgcgtcggcgtcgtggtagcccttagcgatcagctcgttgatggaccaggccacgtcctcggcgtcaagtttgtcgccattgaagaaggtcatgttcttattgaggtggaaggtgtaggtcaggccgtccttggacgtctcccagctggaggcgatggcgggagcgacctggttcttggagtcacgtgccacgatgccttcgtatacgttgccgatcaggatctggtcaagcgcggagccggcggtgttgcggatgtccagattggtgggggccagtttgaggccgatggtcacggtgtcggcatattggttgctggacgaagccgacttgtcatctttcttaccgccgaaagcgagcgtgacgccgatgacgaccgccactgccacgatgacggcaatcagtgagatcagccaccacttcgggccgctttttttcggattctttgcgcgcgaggcaaggctcgcatctgtggttgcgccgtcttcgacgtgcgcaccattgtcttgagacatggttcttcctctgtatatgttgtgttctacggttggccgccacgctgggtcgaccaccgcaggccatcatagccatgggactgtagaattgcgcatgaaatccatcttgaatctggagggttatcatgctggtcgccgttgatatcggcaatacgaacatcgtgctgggctttttggatggcgataccatcgccggcacctaccgcatcaccaccaaagccaaccatacgtctgatgagtatgggctgtttctgactgaattcctgagaatgagcggttttcagccatccgatgtggacgatgtgatcatctgttcggtggtgccgaaagtgatgcactccttccgttcgtccatcgtcaaattcctcgacattgatccgatggtggtgggaccgggcatcaagaccggtatgaacgtgcgcgttgacgatccgaaatcgctgggtgcggatattctggccgactgcgccggtgcctattacgagtatggcggcccagtgctggtggctgatttcggcaccgccaccacgttcacacacgtgagcgacaagggcgtggtcgattccggcgtcatcaccaccggcatccgtgccggtgcggccgctctgtggggagatacggcccagctgccggaagtggaaattacgcgaccagatacgattctgggcaccaacaccaagacctgcatgcaggccggtttgtattacacgttcttgggcggtgtggagcgcacgattcgtcagttccgcaaagagctcggaggcgaggatttcaaggtgatcaccaccggtggcctcggtcgagtgtttgagaatgacaccgagctgattgacgtgtatgacccggatttgattttcaagggcatggcgcacatctactcgcgcaatgtgaagtgacgtagtatgcaggaatcggccgcgtatagcgcggtcgattccgacccaaccccgaatccctacttaatcgtaaagccctgattgaagccgtattctcggaggtctttctgccattgggccaggccgtcggagagactgactttcttgccgggcttctccaacggttcgagcgggttgccttcctcgtccttcatgcccatctcaatggcttcctgtcgctgctgataggcgtggaaactgccggaccactcgtatgcctggcccaccgtcgatttgaagtcactgcgcgcatacacttcgaatggcagatactggtatccgaccgacacatcctcggcggcctccgacagtacacggttgaacttctgcccgccgaaatacgggatttcaatgccccggtcattggtaatcgtggttttatccaaaaaatcagcggaattcagggtggcataatcggccgggaaagcaccgccatccacacgcgcgctaatgccttgggcgtcatgcgccacaaagtccacgaaacgataagccgcatccggcttacgggtcaattgcagtacggtcagtgccgacccgccgctttcggcgttggtgggctggccatcataggtgggcatgggagccacgcgccacagaccggccgcgcccggcacattggacagcagcagcgacggcatccaagccccagagaacacggaggcgatggtgccggtgcccactctgcttttccaccgatccgaccatgtggcggaggtggtgtcaacaagcccctcatcgatcattttctgccagaattcggtgaaccgttgggtgccggcatcctcatccaaatcgatggtcacggttttgccgtcggccgacgtgtggaacggctgaccaccggcgagccagaccatcgcgtcatagaaactgccgtcgcccgagtcggcggcgatatacgcgccgatctccttgagcttttcggcggcctcgtaatagtcatcccaagtcttgatcttggtggcgtccacgccggcttggcggaacacgtcttcgttgtagaagaagcccatcgggcccgaatccatgggcagtccataggtacggccggcgagctgcacggacgaccatgtgccgagggtaaagaagttggaataatccgagccgattttgtcggtcagatcaagcaattggccggagaccgcgtactgcaacagtgcatagtattcgatttgagccacgtccggcgtgccgtaaccgtcttgaatggcggtattaagattgccgtagccggagatattggtccatttcacgcggatgtccggattggctttttcgaaacggcggatgacctcccccatgctcggttcccagctccatacgctgatctccgtacggttgtcgtccgtggcctgcccgcacgaggccagggatacggaaaggatggcagtcactgctatggttgccattcttttgattcgctgtccgatcactcgcatggtgacgagtgtactaggcggggcttaaaacggtaaaagccccgtgacgggattcgtcacggggctttgtgtatcaggtgagattagctaggcagtctcagcgagggttcaaggcttacttcacggtgaagccctgatccttgccgtaatcctgcagtgccttctgccaagcggcgataccgtcagtcagcttctggtcgccggtgtaggacttgccaaggtagtcgccgaagatggtgcgggccttgacctcgtagggcaggaactggtagtcggaggacacgttctcagcagcctgagccagaacctcgttgtacttctgaccaccgaagtagtcaacgtcctcgccatcggcgttcttcacagtggtggtgttcttgaaggagtcggactccatggaggccttgtcagccgggaatgcaccgccggccacacgggtggccacgccgtcgccgtggttggcgtactcgatgaactggtaagcagcgtcagccttcttggtggaggcgagcacagccagcgaagaaccaccgttctcggagttggtggtggagccgtcagcggtcggcatctgggtcacacgccacttgccagcgccgtcagcagcggagttggccaggttggcaggcatccaagcgccagtgaacagggaggcgatggtgccgtcgaccatgcccttgaaccagtcctcagaccagccagcggtcttggtgtcgagcaggccctcgtccagcagcttctgccagaagtcggtgaaggtcttgacgcccttgtcctcggtcaggttgacggtgacttcggaaccatcggaagaggtctggaacggctttgcaccggccagccaggtcatggagtcgaagaagccggcgtcaccggtgtcggaggtgatgtagtagttgtcgcccagagcgtgaatcttcttggcggcgtcgtagtactgatcccaggtcttgatctgctcggcgtcaacaccggccttgtcgaagacctccttgttgtagaagaaggccattgggccggaatccatcggcaggccgtagaccttgccggcgaactgcacggaagcccacgggccaggggtgtagaagtcggagtagccggaggtcttgtcggtgatgtccagcaggttgcccttgatggcgtactgcgggatggcgtagtactcaacctgagcgacgtccggagcaccggagccggcctcgatggcgttatcaagctgggtgtattccttggtgttggtgccgacgttcttgagatcgaccttgatgccggtcttcttggtgaagtccttggcaacctgggtcagcgtgggctcccaagcccacacggtgatttcggtaacgtccttatcttgagccggcttgccactggcggtgtcggaaccgcaggcggcaacggaacccagcatggcaaccgcaccggtaagtgcaatggccttcttagcaacggtgaacttcatcgttctgttctccttccttggatcgcctttcggcggtctgcagtgattgtcaccacaacagcatggcaactctcctcgtcgtcatgctatcgtgaaccatcactctatggttcagtagtcacaaaacggctttgtttcgccactttgtagctatggttgcgataacatcttttattatacacattcttcggcaacacgccatcttggtatcgcaatccgcgcgccactgctcccatggcataagaaaatcgggcgctccgaagagtgcccgatcctgttatcgcaacctcccgctacagaaaccacaggaggaagtctgctgcgattgccgttacttcacctggtagccctgctgcttggcgtaatcctgcaggtccttctgccaggaagccacggcatcggagagcgtggtcttgccggtgtaggcatcgccggcgtagtcgccgaacttgccgcgagcgtagacctcgaagggcaggaacttgtagccggtggacacattggctgcggccttggccagctcctcgttgaacttctgaccgccgaagtactcgtgggccttgccgtcggagtcggtcagggaggtcatgttgaggaagtcgttggacttgagggtgtcgttgtcggccgggaaggcaccgccgtcaacacgggtcttaatgccctcggcgtcgtggcaggcgtattccatgaacttgtaggcggcggcgaccttggccttgtcgtcggacttcacgatgaccagcgaggaaccaccgttctcggagttggtctcggagccgtctgcggtcggcatctgggcgatgcgccacttgccgtcaccgttcggagcgccggaaagcaggttgtacggcatccaagcgccggtcagcagggatgcgatggagccgtcatccagacccttgttccaatcgtcggtccagccgacggtcttggtgtcgatgaggtcttcgtcgatcatcttctgccagaagtcggtgaaggtcttgacgttcttgtcaccggtcaggttgatggtcacggtctcgccgtccttggaggtctcgaacggggtcgcgccggccagccaggtcatggagtcgaagaagccggcgtcaccggaatcggaggtgatgtaggagtccacggcgcgaatcttcttggcagcctcgtagaagtcgtcccacgtgcgcacctgggtcggatcgacgccggccttgtcgaagacgtccttgttgtagaaccaggccatcgggccggaatccatcggcagggcgtagacgccgtcattgatgctcaccgaggaccacgtgcccggggtgtagaagtccttgaaatcggaggcgccgagatcggagaggttctcgaggtggccgcgaatcacgtattcgggcagtgcgtagtattcgatctgggcgatgtccggagcaccggagccggcctcgatggcgttggacagtgcgttgtactcgtccttgttggtgccggcattggtcaccttcaccttaatgttcgggttcttggcctcgaatcccttgaccgtacgaggcagtgtggaatcccaggaccacacggtcagctcgatcttcttatcagaggagccggtgcttccgccatccccggcagaggtggaaccgcaggcagctacagaggagagcatggccacagcaccaatcagggcaattgtcttcttgccgaacttcatcgttctttccttccttgttatgggaaacgacgggacttggcgttttgttccaagtcttgtatcgttttaagaaacggtaccacatgttttatgtttacgcaaacacgacacgtcgcaccatagtgactaaccacaaaccgaaaccatagtgactaaccgcaaaccgaaggagatgcatcccgctcatgaccactcacaacagccagtattccgccgaaaccgcccatcccgacaagcaggaaagcagcccggcgccgaccgccgccggcaccacggccagtaacgtctccacaactggcaacgcaaccacgccggacgccagcatcgccctcaatgccgacgccactccggtagccgacgttcccccgcgtctgttcggctcattcgtagaacatctgggccgttgcgtctacggcggcatctacgagcccagccatcccaccgccgacgaaaacggcttccgccaagacgtgcttgatctggtcaaggaactgggcgtcacctgcgtacgctaccccggcggcaatttcgtatccaactacaactgggaagacggcatcggcccacgcgagaatcgccccgtacgccgcgacctggcctggcattgcaccgaaaccaatgaaatgggcatcgacgacttctaccgctggagccagaaagccggcaccgaaatcatgcttgccgtcaacatgggcacccggggtctgaaggccgcgctcgacgagctcgagtatgtcaacggcgcgcccggcaccgcttgggcggatcagcgcgtggccaacggcatcgaggagccgatggatatcaagatgtggtgcatcggcaacgaaatggacggcccgtggcaggtgggccacatgagtccggaagaatatgccagcgcggtggacaaggtggcccacgccatgaagctcgccgagtccggtctcgaactcgtggcctgcggttcctcgggtgcctatatgccgaccttcggcacgtgggagaagaccgtgctcaccaaggcttacgagaatctcgacttcgtctcctgccatgcctactacttcgaccgcggccataaaacccgggccgccgcctccatgcaggacttcctggcctcttccgaagacatgaccaagttcatcgccaccgtctcggacgcggccgatcaggcgcgcgaagccaataacggcaccaaagacatcgccctgtccttcgacgaatggggcgtatggtattcggacaagtggaacgagcaggaagaccagtggaaggcggaggccgcgcagggtttgcaccacgagccatggcctaagtctccgcatttgctggaagacatctacaccgcggccgacgcggtggtcgaaggttccctgatgatcaccctgctcaagcactgcgatcgcgtgcgttccgcctcgcgcgcccagctggtcaacgtcatcgcccccatcatggccgaggaacacggcccggcatggcggcagaccacgttctacccgttcgccgaagccgcccttcacgcgcgcggccaggcctacgctccggccatcagctcccccaccatccataccgaggcatatggcgacgtgccggccatcgacgcggtagtcacgtgggatgaacaggcccgcaccggtctgctgcttgccgtcaaccgcgacgccaacaccccgcacacgctcaccatcgacctttccgggctgcccggcctgcccggtctcggcacgctcgcgctcagcaaggcgcaactgttgcatgaggacgatccgtaccgcaccaacaccgccgaagcgcccgaagccgtcacgccgcaaccgctcgacattgcaatgaacgccaccggcacctgcacggcaacgcttcccgccatctcctggatcagcgtggaattccacggctaaaagacggagagtcacgcccgtaccaagtacagtcaagtccaatacgaccagggcccgtcaatcaccatacgattgacgggccttgtcattcacttcggatatttcgaaccacggattcatcaggcgcgcgccaacgccggtgaggactcgcgcagggagaggctatagggggcctcgatggtttgggcgggggcacggctgccggattcgacctgttggatgatggattcgacggccagtcgggcgatggcttccctgccggggttaacggtggaaagagacggcaccatgtaggccgattcctccacgtcatcgaagccgataacgcgaacatcatccggcacggcaacgccgcgttcgcgcagttcacgcagcacgccccacgccagcaagtcattcaaagcgaacacggcatcgaattgcaggccactctccagcatggtgtccaccgcgaccaaaccgtcggcgctcccccagccttgggtttcgataagcagactgtcatcacaggggatgccgcgcgcggccagcgcctcacgatatccgtgggtgcggatggagcccgacgagaaatcgtgctcggggtggggcacggcaccgactacggcgatgcggcggcaaccggcatcaagcaggtgataagtcgcggcggcggccccttcgcgattgcgaatcactacgtgcggcgcgttgacgccgaacaaacgttcacccaacagtacgagcgggtaatcgccatccaaagccgcgatatcgtcaaccgtcatcatcagagggcttaagatgagcccgtccgcgctgtgcgtgcccatcgatgcgatgctttccagctcgcgggcacgattgttagtggtggattccacgatgacgccgtagccatgttgccgggcctcggccagaatatcctcggcgagttcggagaagtacacctgccgcagatcgggaataaccagcttgagcaaccgggtacgcccggaacgcaggtttctggccgacgagttgactttgtatccgagcctgtcgatggcttccgcaatacgcgcggccatcgcctcgctcatatatggctgtttgttcagaaaattagacaccgaggctaccgaaacaccggcctcatgggccacgtccgccatcgtcactctgtttttgcctcgcacggtgaccaccctacccgactttgctggagatacgaaaacgactcccctgctacgatgagcagcaagggagcctttcggtaattaggcgctatgcgcggttttacagcttgacgacgagtacgccgttgggctggatggcggccgtgtgctcggactcgttgacctgggccagcgaggcgaccagcggttcgccttccacgtccacgaccgcaacatcgtgggtgcggttgaacaggaacacgaagtggttctcgccagtttcgtccgcacgctcgacgcgcagcacttcaccgcgatcgtcctcagccgaagtctcgatgccgagttcctccagcagcacgggcaggctcttggccaaaccctcacggccgagacgggcaccgacgtatgcggccttgccgtcgccgaagtcgttgacggtgatggcgggagcgccgtcgaaaccggtccacttatctgccttgaaggaggcgaccacgtgagcggtatcggccacggaggtgatcacgtcggcgaaatcgtgcgccacggttccgttgtccaagtcaaggtggtccatggcaccggggaagtcgttgcccatcggggcgaattcctcaacgcgcacacccaccacgtcacggatggaaccggggtagccacccagccagacgtgatccttgtcgtccaccagaccggtgtagtaggtcacgaacagcttgccgccgttcgccacatactcgcgcacgcggcgcgtggtctcttcggacaggatggtcaggctcggcagcacgacggcttcgtactcgtcccaagggccgcgaaccggcaccacgtctgcggtcagaccgttgtccgccagcgcgcggaaccacgcgagcggctcggtccaatggcgtacctcctgagtaggcgtggcggtgtgttccgtagcccactgggactcgtaatcgaagacgacggcgaccttggacttgaccagcttggtgctcagcaggccctcgtcagcaagcttgttgaggtcggcacccagctcgcacacatcgcggaagatctgggagtcggggcccgcgtgaggaaccatcgaagagtgccacttctcggcaccggccttggactggcgccactggaagtagcagatggcgtcggaccccatggccaagtgggccagggagtcgcgcaccaattcgccgggctcgacgcgatagttgatcgggcgccaattgacggcggagctggagtgctccatgaggaaccacggattcttgcgggcgatgccgtcacatagggaggccgagtaagccagctcgtcgaagtgagcttcgccaggcgtgaagtagtgatcgttggacacgaagtccacgtcgtaaccccacttgtcgtaatcgatgccggcaccgccggcggagaccatgaagttggtggtctgcggcttgggggcgatctcgagcagggcgtcgcgctcggccttgtaaaagtcgagcagggcgtcggagctgaagcgcttccagtcaagcagcttgcccgggttcatgaagttgccgtcgccgatgaagcgcggcgggatgatctcggaaaaattgttcatgcgctgcgcccagaatgcggtgccccaagcgtcgttgacggcgtcgatggtgccgtacttcttctcgcaccacttctggaaggcgcgctcggcgtcttcggaatagtcgaagcggttgtggcagccgtactcgttgctcacatgccaagagaccacataggggttgtccttgtagtgctcggccatcttgcggcacaagctgagcgcgtagtcaaggaagaccgggctggtggcgcgccagtgctggcgggcaccgggctggcagacgtcgccgcggtagtcgacccagaggatctccgggtgggcctgggtcatccacatcggcggggatgcggtgccggaggcgagatcgacggcgatgccggccttaccaagcttgtcgatgacgcggtcgagccaatcgaagtcgtacacgccttcttcgggctcaagcttggcccaggagaagatggccacggagacgaggttgacgccggcctgctgcatgagggctacatcttcgtcccacacttcctcaggccattggtcggggttgtaatcgccgccgtaccagatgcggggcttgttgcccgcaagcggctgcggccacttgaactctttacgttccatgatgattcagctcctttattgaattttatcgataatctgcgtccgcgggaataaacagcccacagggctgtttgcctaacggctcagctcgtcagaggggggggcttggcactattacctccctctgatgaggaaggttgtctcggcggagccgggacggagggagagaccccgccgcgaggcggtgaagacaccgcgtcggcggagccgactccatcactccttgacggcgcctgcggcgaggccggactgccagtacttctgcaggcacaggaacgcgatcaccagggggatgatcgtgatcagggagcccgtgatcaccaggttctggatcgcctggccgccagcggtgctcgcctggtccttccactggttcaggccgatggtcagcgggtaccagtccgcgtccttgagcatgatcaacggcaggaagtagttgttccacgtcgccacgatcgtgaacagggccgtcgtaacgatgcccggagccaacaggggcaaggaaatctgccagaacgtgcggaactcggacgcgccgtccacgcgcgccgcctccagcagctcctggggcacggcctgctcgctgaagatccacatcaggtacaaaccgaacgggctgatcagcgacgggatgatcatggcccacggggtgttcgtcaggcccaatttggcgaacaggaggaactggggaaccgccaaagcgatgcccggcacgctgatcgcgccgatgatgaccacgaacaccgctttgcgccccgggaagcggaacttggccagagcgtagccgcccatgatcgccagcagggtcgcgccgccggcgccgaccaccacgtacaggagcgtgttgaacagccagcgcccgaagataccgtcctgataggagaacaccgtcgcgatgttgtcgaacagggcgaacgtcttgccgaagcccaggccgaacgtactggtgaagtcggcctgcgtcttcgtcgcgttgatcaaaaggtagacgaacgggaacaggcagtacacggcgaagaccgcgcacaggacggtcaacaacgtggaacgcctcgggttgttcacgttcgcgaacccggccttcgcgctgcgcttgcgttcggcggcctcgtcggcggcgatcctcttctggcgggccttctccgccttcctggcggccttctcctgggccttgagctcgccgtcggtcaggcgaccggcggccgaagtcgttgctgcactcatcacatacgctccttcacgatcatcatcgattcctcaacacgaacagcggtcatcgtcacttcatctgctccttcaggctgttcaactggacgatgtaggcgatggccatggtgatcacggccatcacgatcgccaacgcggccgcataattcgactggttgccggagaagctcaggttgtacgcgtacatgttcggcgtgtaatacgtcgtgatcgcattaccaggaaccatgttctgcaaaatgctcggctcgttgaacagctggaacgagccgatgatgctgaagatcaccgtgatagccaggctgccgcgcaattcgggaagcttgatgctcttcacgatctgccactccgacgcgccgtcgatgctggccgcctcgtacagggaatgcgggatggtcgacagcgagctgtagaagatgagcatgttgtagcccgtgaactcccacgtcacgatgttcccgatactggccaacaacacgctgggggcgagcacgtcgatgtccgtacccaggaaatcgttcaacgaacccaccaggccgtacttcgcgccatacacgaaaccccagatcaacgtcgacaccaccgccggcaccgcgtagggcaggaacgtcgagatacggaagaacctcgtgccatgcagcttcatcgaatccaacgccagggccatcaaagccgacaggcacagcatgatcggcacctgcacgcacgtgaacagggccacacgaccaacactgctccagaactggccatcacccaacaggcgcgcgtagttctcgaagccgacgaacttggtgccgccgatcatctgcttcttgaagaacgaaatataaacggcgtacacgatcggcacgatgaacacgaacacgaacaccaccgcaaaaggccacatgaatttccatccacgccaatcggccttgtgcttattcacacgagccttgcccgaatgcacgggcgcagctgcgatatcggctgaagccattcccaacccctctccttcgaaggttgaccaaaatgtttgcgttatcatcataacaccatttgtaacattgtccaatcgtgttgagtaccgtgttgaattaagggtttctcagtcactctgctacaatggtcacgaagacaacgatgttatcgttaccgtaagcggccctaagataagcgctgcaaacgaaacaccgacattaatgagtcaagcgagggtgaaatgtcgaggccaacacaggtgtccatgcaagacatagcgaaagccgccggcgtttcgccacagacagtgtcccgcgtggcgaatggcagcgatgcggtgaaacccgaaacacgccagcgtgtcgaagctgcaatggaacgccttgggtatcgtccgaattatgcggcccgagccctaaagcacggccgcttccaggatatcggcgtggtgatgttcaacaccgccacgttcggcaacgcccgcatccttgattctattgtggccaacgcggccgatgacgattattcagtcaccatccagaccatgcgccacggtgcggaacgcacgctttccgccgccatcgatcgcatgcagcgtcagccggtggatggtgtcatcgtagtgctggaggaacgcatctccgatttcgtcggatacaagcctccgcgagaatttccagtcgtgctcatctgcgaatccgccgccgaccactgccccaccgttgacgccgaccagtatggctgctcgaccgctatcgtcgattacctgatgagcaaggggcacaagaccgtctaccacattgccggaccgtccacctcgcgcgccgccgaaagccgcgcccgcggttggcgagaagcgttggaacaaatgggagcacgcgtaccgagcatgtacatcggcgattggtgcgcggattcaggctaccaggccggcgtggcgttggcccacgaccccgactgcacggccatctacgccgccaacgaccaaatggcatacggcgcaatgctcgggttgcagtcagcgggcaagcgcgtgcccgaggatgtcagcatcgtgggcgtcgatgattcgctggtagatatggttccgcgcttgaacctgacgaccatgaagctgcgctttgacgacattggcgccaccgccttctccatggtccgccgtcaatgcgaaggcgagaagataccggtcggcgtcaaaaccgtaatcccgccggaactgatcgaacgcggttccgtgcgcgacatcagctgacgagcggcatgtgctggcatccactggtacctgtcagtgattcacctgccagtgatccataggcaattccgcaccgaccaatcgactcggttgtgcaatattctgcacatttccaactatgtgcagaatattgcacactttactatactgtgatatattttgcacatgattgtcatggatatcgccgaatacgcgcggcttatcaaggatgaaaggcaacgccagggcatcagtcagaccgacatggcccaacggctgggcgtgtcacgtcgctggctgatcgaatttgaacacgcccgagtccccaatcccggattctccaccattctcagcgctctgactgagcttggcttgtcgctggatgtccgcaaaaccccgcagcccgccgaactctatgaatggtgacaccatgagcgaaaacactctcaatgcatttctcggcgaaacacccatcggccagtttcgaagaacaaacgatggcagcattattttccaatatcacgattcctatcgttggtcgcaatcacccacaccaatatcgctttccatgcccattaccgcagccgaatattcaggcgacatcccgcgtaatttccttgaggccctggtcccggaatcccctcaggcccgagatgaagccatgcgattgcatcatgcccgatcgacaagcgcatttgatctgttgcaagccatcggattcgatgccaccggcgcattacggctgtccgccgacccgcacttgcccatagatgacgattcgcttattccaatcagcgattcgcagatcgcgaatcgactacgcgcagccgcccccacaggcatccagtccgcaagcgtagacgagcattggtcggtcgcgggacagcagggcaagatcgcactgaggaaccgcaatggatcatggttctccaccactggaatcgcgcggacgactcatatcatcaagcccggcataccgacccttccacaccaagcattcaacgaacacatcaccatgcgcattgtggaggcgatgggaatacccgtggcccacacctcttttcacatctttgatggggtcccagccatcatcagcgagcggtatgaccgtatagtgtccgccaatggtacggtgacggccctgcaccaagaagactttacccaagcgctgggcattccctcatcgctgaaatacgaggaacacaacggcccaacgtccaatgcatatgcggaaatgttgcgcaagcacggtctgcccggtcaggccgaaagcaatatccgagccttcaccgacggcatcctcgccagttatctcgtcggggcaacagacagccacgccaagaactactcgctattgctcgatggcgcgtccgtgcggcttgccccgctctatgaccttgcttcggtgttcccttatttggggcatggcaagcagatcataaatgccactttggcgatgaacatcggcgggcgccgagatcttcttcaattacgccgcaaacatctggaacgattcgcacagcggatgggattagatgaggaatccgtgattttacgattccacaccttggtggataggctgccggaggcattcgacagcaccgtgcaacccgctcacgacgttatcgcgagcattggtgcgcaggaattcatcgatagctatcgcaagcgcatcatgatggtgtacgacgatgcaatgagctggatggccagtcgaaagggacagtgattcggacgggcggggattggtctcgccatccccccctaagaaatcagatcttaagcggcacacgggaaacgaattcgcgcttctcgcctgttattggatcggtgaatcgtagcacacgcgccactaattgcagcggctggctgaaatcgtcgtaggggcgtgtctggatgcgcgggtagaagtcgtcacccacgatgggcaggccgagcgaattcatgtggacgcgcaattggtgggttttgccggtgcgcgggtggagtgtgtagcggcagatggggtgatttcccggatggggaccaccctccggcgcttcgcgccacctcccgccagcgggagggaaacagaggtcaccgcgctcgatgagggtttcggcgttggccaaacccggttcctcgaatgcggccatcgtgccgtgttccttggtgatgtgcgatcggcgcagcaatgggaacgggcgtggcggttcgacctgcatgatcgtgccgaatcgtgggccgctgatcggccggcagggtgccaggcattcatagatcttgacggcctgccggttctggaacagcatctgatacgcgccgcggcaggccgaatcccgcacgaacaccaatacgccggcggtcatgcggtccaatcggtgcgctggcgtgatgtccggctcccccagccgctcacgcaatcggatcagcgcggtctgccgataccacatgccgcgtggcatggtggccagaaaatgcggcttgtccaccacgatgatccgctcgtcctcatacagcacgtccatctcaaacggaatatgaggctcgtcaatcacataccgatgtggcttactcaacggtcacggacttggcgaggttgcggggcttgtccacgtcgtagcccttgagctttgccatgtccatggcgaacagctgcagcggcaccacgtcaaccagcgggctcatcagcgttgggcaggcggggcgccagaacaccacgtcagcgtaccgttccacatccgggtcgccctgctcggccacggcgatgatgtacgcgccacgagccttgacctcctcgataccagagatcaccttggcgtgcaacacattgcggccgcgctgcggcggcacgatgaacaccacgggctcaccctcgtccaccagcgcgatcggtccatgcttgagctcgccggccgcgaagccctcggtgaacgtgtaggcgatttccttgagcttcaacgcgccctcaagcgccaccgggtagcccacgtggcggccgaggaacaagaaggagttggcgttcaccatgcgctcggcggccgcctggatggtcttgggctgggtgtcgagcacccactgaatcttgcgcggcatgtctttcagggagtcgagcatctgatgaatctcatcgcggaacatcgcgcccttgacctgcgccagatacaggcccagcaggtaggcggcggtaatctgcgccacgaacgccttggtggatgccacggcaacttccgggccggcgtgtgtgtagagcacggcgtcggattcgcgcggaatggaggcaccctgcgtgttgcagatggccagcaccttggacccctgttcgcgcgcgtggcgcagggccatcagcgtatccatggtttcgccggactgagaaatggccaccacgagcgtacgcggggtcagaatcgggtcacggtaacggaattcgtgcgcgagttcgatttccacggggatacgcacccagtgttcgatggcgtatttggctacctggccggcgtagctggcggtgccacaggccacgacgatgattttgtcgatggacttgaagtcgtgttcgtcgatacgcacttcatcaagggtgatgtcgccattcgtgtcgaagcggccaagcagggtgcgctgcactgcggcagggtcttcgtgaatctccttgtccataaaggaatcccagccgcccttttcggcggccgaagcatcccaatccacggtgtaggtcttcgggttttcgaccacgttgccgttgaaatcggcgacgatgaccttgtcggcggacacgcatacggcctgatcctggtcgacttccatggcgcgcttggtgtaggccacgaatgcggcgacgtcggaaccgaggaagttctccccctcgccaaggcccacgaccagtggcgaatcatggcgggctccgaccacgatgtccggctggcggcagtcggtggccagaatggtgaacgcgccttcaagcatgcgggccatacggcgcacagccttgaacaagtctggcttgccttcgtccgcgataatcttgtccacgatcttgccgagcagcttagcggccacctcagtgtcggtggcggaggcgaatcggtagccttcggcttgcaggtcgagacgcagctgagaggcgttttcgatgatgccgttatggatgatggccaccttgccgtccatgctggtgtgcgggtgggcattcacgtcgctcggctcgccattggtggcccagcgcgtgtggccgatgcccaccgtggcgagcggcatcggcttgcgctcgatgtcttcgaccaggttcttcaaacggccggccttcttgcgcacgaccaccttatccatgccgggcgcggtcagcgccacaccggccgagtcatagcctcggtattccagacgttccaggccttgcaggcagacctccaaaggcttgccgcatgccgtttcaatatttcccgcgtatccaacgattccacacatggctcaccagcctagcggacgattattgcgcaaagcgaatccaacccgccgcctttgcaggattggaacatgccccttcgtgaaaagcgtacgctgagttcatcagcgtacgcttttggagctgcaacaacgagccttcctacagcacgtgctgtaggcggagccgtaaagcggggagcccagtgggctccccgtaggcgacgccgaagcacgacagtgctgaggtaatataacagtcttcctacagcacgtgctgtaggaagtccttaaacctaggctcggtggggtggtcgatgatgtcggggccgcccttttctacgactacgccgccgtccatgaacacgatctggtcggcgacttcgcgggcgaagccgatttcgtgggtcacgcacaccatggtcatgccttccttggccaaggaacgcatgacgttgagcacctcgcccaccagttcggggtcaagggcggaggtcggctcatcgaagagcatgatctccggcttcatggccagagcacgggcaatggccacgcgctgctgctgaccacccgacagctgggaggggtaatagtccatgcgatcgcccagaccgacgcgctgaagctcggccacggccaggtcacaggcggctttcttggactggtgctgcacgtggatcggggcttccatcacgttttccagcgcggtcatgtgcgggaacaggttgaagcgctggaacaccatgccgaggcgagagcgctgtgcggcgatctccttatcgtccagggtctgcagcatgtcctggccgtttttggtcacgtgcttgtagccgatgagttcgccgtccacctcgatggaaccgccggtcagggtttccagctggttgatcagacgcaggaacgtggacttgccggaaccggagggccccagaatcacggtcacagtaccgggcataacggttagatcgatgcccttgagcacatgcagcggcccaaacgccttgtgcacctgcacggcctcgacagcaggaatcacggaaccgtcagccgccttgcgcacgaccggggcaacactggtgatgtcattcgtagtcataatcgcgctcccgccttatgcattcaatccgacaaatgtggtctggttgagcttgtccacgtcatccttcggttcaccgtcggtcttacccggcaatggcgtctgcttgcccttggtgcccaccggtcgggcatcgaagcccttgccgaagtgcgcctcgaggcgggactgcacaaccatcagaatggaggtgatcagcaggtaccagaagcaggccacgagaagcagcggaatcggcttgtagatacggttggcgatggcgttggtggcgaactgcagttcgagggtgaacggcacggcggtgaccagcgaggtggtcttcagcatgccgatggtctcgttgccggtgggcgggatgatgatgcgcatggcctgcggcagcacgatgcggcgcatgatgagcgtgcggttcatgcccagcgccttggccgcctcggtctggccggggtccacggcttcaaggccggcacgcacgatttcggacaggtaggcggcctcgttcagggccagaccaatccatgcggcgttgaatgcggtgatcaccacgttggagtcgatgctccagaactccaccgaggtgaacggaatgccgaggctgatcttgggaatcagcacggcgaacagaccccagaaaatgagctgcgtgtacacaggcgtgccgcggaagaaccagatgaagaaccagctgacgccgcgcagcaccggattgatggatttgcgcatgatggcaagaatcaccgacaggatgatcgccacgaccatggagatcacggtgagctccaaggtatagcgaatgccttcaagcacgttctcgttgaacaggtacttccagacggtgggccaatccagtcgcggattggtaatcaagccttgaatgagcatcgcggcgagcagtaccacgatcactgcggccacaatcgggccggggcgcttgaccggcagcgccttgatgcgattggggatgttcagcccctcaccgtcgacttctttcttcgccataatctggttccttggatgtgttgggcagcctgaactgcaagttgcaactagcattgaaccttagtgcacgaatggggcgactgtgttacaaacagtgcgccccattcgaattttcgcgacagcttgtcgactattcgacggccgggttgatttcggccttgtccagtgcgccggattcgacgccccagtgctggaggatcttggtgtaggtgccgtcgtccatgagcttttgcatggccttctgcacggcttcggcggtctgggaatcgcccttcttgatggcgatggcgttcggcacttcatcgaagtccttgccgagctgttccagctgaccatcggtctgggcgatggcgtagccgacaaccggggaatcggcgaagaagacgtcggccttgccggtcaccacagcggtggtggcgtcggtctgctgcttggaggactggatggtgatgtctttcttgccgtccgccttgcactgcttggcggtcttgttgatggcctcttcctcgacggtgccggtctcgacggcaacgttcagaccgcacaggtcgttctcgtcgacgttcttggggttgcctgtggccactgcatagcccatgcctgcggtgaagtaggagacgaagtcgacggattccatgcgctccttggtgatggtgaaggcggcgatgcccagatcgtacttggagccgatggccggaatgatcgtatcgaagttggaggagacgatttcggtctcgagaccgaagatgttgcccatggcgcgggcgagatccatgtcgtagccgatctgggtcttgccgtcggcgtcgaggaattcggccggggcgtaggaggggttggtgccgatggtgagcttgccgtccttggtcacggattcaggcagcagtgcggcgatggtgtcatccttctccacggagctgacatcgtagctggtgatggtggcggcatcggagcccttggcggaatccgtaccggcatcggccttgtcggaggtgccgcaagcggcggtggcgaacagcatggccgagctcagtgcaatggccataatggacttcagtttggtggactgcataatcgtttctttttctctcttacgccgcttcaacggcaacgatcaacggttaagcatatttatacactacagtgcatacatatacaaaaagactcccgccgcagggcaacgggagtcttcatagtaaccgaaactactcgacggacgggttgatctcggccttgtcgacggcgccggaagagacgccccacgtgtcgaggatcttcttgtacgtgccatcatccatcagcttctggatggccttctgtacggcctcggcggtcttggaatcgcccttcttgacggccacggcctcaggggtcacaccaacgtcctcgccgagggcctcgagcgtatcaccggtctgcttgatggcgtagccggcaaccggcgtatcggcgtagaagatatcagccttaccggaagccacggcggtagtcacatcggtctgcagcttggaggactggatgtcgatggcatccttgccgtccgccttgcactgctcgttggccttgttgacttcctcttcctgggtggtaccggtctgcacagccaccttcacgccgcacaggttcgaggagtcgaccttgttcgggttgcccttctgcaccacgaacgtggaaccggccttgaagtaggtgacgaagtcgacggcctccatgcgttccttggtcacggtgaaggaggagatgccgatgtcgtacttggagccgacggacgggataatcgaatcgaacgtggaggagacggtgttttccttcagtccgaacactgcggccagcgccttggacaggtcgacgtcgaagccgaccggggtcttgccgtcctcggccaggaactcggccggggcataggaagtatcggcgccgacggtcagcgtgccgtcgccggccacggaatcgggcagcagtgcggcgatctcgtcgtccttctggatgctgctggtgtcgaagccttgaatcgaagtgctggacgagtccttggatgaatcgccgctcttggatgcggtgtcggtgccgtcagtcgtgccacaggccgccacggcgatcagcatggccgcgctcagggcggcggccgcagcggattgtattcccttgcttagagacattggatttcctctctccggatagtcagctgggcgggtatgtttcccagatggttccagagcgtaggagtgcaatgctacggaagcgttaatcgtgggcgaaatggcccacaacgtggacatcctactcttggctcccctccggaggggagccaagggacgggactagtggcgcatgttggcgtagcgcatggcgcgtagggcttcgcgcttgtcctgctcttcgcgcagggcctggcgcttgtcgaattccttcttgcctcgggccagtgcgatctccgccttgacgcgaccgtccttgaagtacaggctcagcggcacaatcgtgtatcccttggcctcgatgccgcgggcgagcttggtgatctgcagtcggtgcagcagcagcttgcgcttgcgcttgggcgcatggttgttccatgtgccgttcaggtattcggggatgttcgcgccctccagccacatctcgccacggcggtcgatggagatgaacgcctcggacagcgatgcgcggccttcgcgcaacgacttgacctcggtgccggtcagggccagccctgcctcgtacttgtcttcgatggcatagtcatgccgggccttcttgttctggacgatgagtttctcaccggtttccttgggcatgtctcctcctttcgtgggcaataactcgtgagtagcaactcgtgggtagcaacgcaacatccgacgatatcacggaccggcctcgaatacgaaaaagggttcctcttcaagaggaacccttcaaccgcatatatcggccgaaccaaccggtcagtggacgaaccagtactgacccaaattggtcagcgtgcggtagttcatcatccacaggccgcccacgttcatctcggagatctggaatgtgccgtcgccatacacggcttcaaccacggcaacatggccataggtaccgtcggcaccgtcctgaccaggcaggaaggagagtgccgcaccgacctgagggttgtggtccacgcgcaagccgtacgagggggcgctgcgccaccagtcgccgccattgccgagataggacggcgtgccaatgcccatctgcctacggcgttcatacgcccagtacgtgcactggccggtggcataggcgttgccgtaatcaccgttcgacgtgccttggccgccgacgctgggggcgggggcgggggcgggggccggcgccggcgccggagcgggcgccggagcgggcgccggagcgggggtcaccggagtggacggcgtaccgccctggttaccggtatccacccggttggcggcgtcctgctgttccttctggtactgacgattgtaggaatcgacctgggaagcgatcagtacggtctgggccgcctgcttggcggattgggaatccagactgtcgatcatggaagacagttcgtcacgccttgtttcgccctcctggcgtagcttgtccaaagcgtcacgttcgctttgcgcggtttcggcggcggtctgtgcggaagcggccttctcatcggactgggtcttgagcacagcgatctgcttttcgatggccgccagacgttcgccacggttcttcgacgtgctcagtgaggtcgcggcggaggaagccgcattcgcctcgttgcgggacaacgcgtcccgggactgcatggagttgacgaagtcctgtgtgctggtggcacccgtcaccacgctcatcacgtcggaagcattcgagccgtgcatctcgtcacgggccagctgggccacggcggcgtgcgcgtcatcgtagtccttgccggtctgcttgatccgctcctcgagcgtctccttgtctttctgcgcggcggaaagacgtttggatgcggcgtcggcctcgtcctgagcggtggcggcatcctcgttggcctgcgtgaccttggcctgcgcggcgacaatcttgttgttggtcagatcgtccagctcaagtaccttattcgccaggtcctggctggcaccggccagctgctgcttgagttcggcctcgcgctgtaccgacgcggcgtgctggttctgcgcattgatcaggtcggaataggtgtctgcctgggcaggctgtgccgagctgaacgccagacctcccacacaggctgcggcggccaccagtgccgccagtgcgggcttgatcacacgtacgttcgtcatatgtgaatagtcctttcgctcacttaagccaataccataacatgcgaacctgagaggcttgcacacgatgtcatcacatttctcgcgggtaagccggtcgcgttacgccctcaaataacgccgcaacgagatggttgaagcgatgatggacagcagtatcgcgcccacaaccaggaacggcgatatcaccagtaccgtgagctgattcacataaggaatccatgtaacggatttcgccagccagccggtgacgaacacgttgacgatagccgaaagcatcaggcacgagagcaccgagccgatcagcgaggcgatggcgccctccagaatgaacggcagacgaatcgtccagttcgaggcacccacgtacctcatgatttcggtttcggttcgtctggatgcggcggacatacgaatggtggttccggtcagcaggatggcgaccaccaccatcacgccggcgagcacggccgtaaccgccgtggctcggttgagcacggcgaacaccgggtcgaagatctggcgctgatcggtaacgtcttccacaccctccttgccagagagcacttcggagaccacctgatatttggtggggtccttgagcttgagccagagggagtcctgcatatcgtccgcggtcagcgtacggccttggaattcaccgttcgggtactgcttggtgaaggtgttgtcgtagaaatcctgcttgctgacatagtcgatgttggagaccacgtcgttgagttcatcgcgaatggttttctgcaatgccgtgatctcactggctgagggcgatttgccggaagcacagttcgcggactggctggtgccgtcgggacatagccacaccacgacctcgaccttgtcgtaccagtcgcccttggctttggtgatctgcgcctgagtaagcaccgaagcgccgatgaacaggaatgagatgaaggtgaccagcgtcagcgacagcagcatcgacaggttacgggtgaggttggcccacgtttcggacagaatgaatcgtgctcgcatgatgatcccccttactccttcgcgccctcagcgggttgatcgtcggatgtttggtctgcggcggactgctcgtcagcaggctgctcggcggcggactgctcgttggccggcggtgcgggcggttccggcggtgcgggcggctccggcggggccggcggctcggcggcggatgacacggacgtatcggcaaccgcggcggtcgcggcggactcgtccttgaacgggtcgaacgcctgggtgctttccagggcggcggcctgctcatccaacgaaatgcccttgccccaggtcagcgtgtcttccagcggcgcaaacgtctcgccatagcggccggtgcggccggaatgcacggaactggccaaacgggcgatgccttcagacggctcgtcactgccctcgatggccttggtcgccgccgccagcacatgatgggcggtgtcggacttggcttcgacttcggcatccgggaagaacagggcggaatcgtaggagccatgagcctcgtcacgcacgatcttgccgttgtgcagttcgaccacgcgcttgcgcatcgagttgacgatctcttcgttatgcgtggccatgacgatggtggtgccggtgcggttgatggcgtccagcacttccatgatgcccagcgaagtggtcgggtcgaggttgccggtgggctcgtcggccagcagaatctgcgggtgattcacgtaggcgcgggcgatggccacacgctgctgctcgccaccggagagctcatgcggatagttcttttccttgccggtgagtcccacggtattcagcaccttgggcaccaacgatttgatggtggaccgccgcgtgccgatcacctcaagggcgaacgccacgttctcccatacggttttgttattgagcagcttgtaatcctggaacacgaagcccagcgaacggcggtactgcggcacttgacggttggtgatgcgccgcagatcgttgccggccacgcgaatctcgccgctggtggcctcctcctcgcgcaacagcaggctcaagagcgtggtcttgccggagccggacgcacccacaaggaacacgaaatcaccgcgttcgatatcgaggttgatgtcgtcaagcgccggtcgggtgcctttgggatagatcttggacacattgtccagtgagatcagtgccataatgctgtttactcctcggtttcggcggcgcggcgctgttcatggcgccagcggatgccggcctcgatgaacgcgttgatgtcgccgtcgaacacggcctgagtctggctggtttcgtagccggtgcgcaggtccttgaccatctggtaggggtgcagcacgtaggagcgcatctgatcgccccagctggccttgatgtcgccggcgagctccttcttcttcttggcctcctcctcgtggcgcagcacgagcagtcgggactgaagcacggccatggcggaggcacggttctgaatctgcgaacgctcatcctgcatggtcaccacgatgccggtgggaaggtgggtgatgcgcacggccgagtacgtggtgttcacgccctggccgccggggccggaggaacagtaggtgtccacgcggatgtccgtatccggaatgtcgatatggtcggtggcctcgaccagcggcaccacttccacggcggcgaagctggtctggcggcggccctggttgtcgaacggggagatacgtaccagacggtgggtgccgccctccacggacagacggccgtaagcgtagggggcgtccacctggaaggtggcggacttgatgccggcctcttcggcgtaggaggtgtccatgaccttggccttgaagccgttacgctcgcagtagcgcaggtacatgcgcaacagcatctgcgcgaagtcggccgcgtcgacgccgccggcaccggagcggatggtcaccacggcggaacgttcgtcgtattcgccatcgagcagggtctggatctccatctggtcgagatccttctgaatctcgccgatttcgctttgcgcctcgtccagagagtcctggtcgccctcctcgtggccgagttcaacgagcgtttccacatcgtcgatgcgctgggaggcggagttcagacgcttcagctgcgattccgcggcggacagccggctggtgatcttctgggcgttttccggatcatcccacaggcccggggccgcggcctgcgtttcgagatccttgatatcggccttgagccggtcgacgtccagcgccttggcgatggattcgtatttggcgcgggcttcgccgatcgcctgggtaaagtcaaattctgccatcgtggtttaccttactgttgattctttgagattctttgggaagtcacgtccttgttgacagccttcgcacattcctctggcgttggcgggcattgccgcgccacacacgcatccgcctgcaatccatgctgccagaaggttccgggcctgccttgccgataaccggccgggcgacctcacaaatccctcgcatcagacgtgttcaactgcgggcacgaatatgcgaaggcaacgtcaaagccccgcgtaaatcgccgggatgatcagggagccgagcatggccacagctatgacgacacacaccacacgcacgatggtgcggcggcggttctcacgctgctgtcggccgtcctgatagttactcacgagaccaatagtgtactcaccgcttacgaccgcaggacttgccgccgacgccagccctgccggcgggcccccacggccctttcctttgcgctttcagcgccgccagatggtgtttcatggccaccagcatgatgtgcgaatcctcaaggcccaagtggcgttcgttgtgggcggaatcaagcgcgccctgacgtttggcgtaggcgtcgagcgtgttgtctccgtaaggatgctcgttggtgggtaccgcgccggggtcccactgccggctcatcggcagggtatcgatgatggtgatgcgcccggcacggtagctttccgcgtatccggcgacgttcagcatgaaccagctatgttcgaaggtggcgttatgcgccacgtacggctgctgggtaagccgcgcgagcaggccggcctgggcttggggccattcgtcgaagagtcggtacccggcctcgctgctgcggccgcgtacatcgatgccggtgagtttggcgatgagggcgttgccgagcgccgcgttttccggcggcacgccaaaagcgagacgggactggccgtaggcgtcgccggcggcgtaatagccctgctcataggcgtatgtctcaggttcgccggccgggcgcggactggccatgttcatgaactcgaagccgacgtcgatgatgtagtcacgcgccggatcgatgccggtggtttcgatgtcgatgcccatcaccgcgtccacgtcgcggccgggcagataggcgtcgcgccagtcgggcttgggatggtggccggtagcgttgccagacgaggcggcaccacccggcgaagtcgcgccggagagattggcgcgggccatcgccgcatcgcccgcacgcttctggaagcgctgggccttacgtcgttcggcgcgtgcgtcaagaatcgccgccgtacggtcttggatatcgtccaaggcgactgttgtggggaacttgacatcgctgttttcggcagcagtgtttccggcagatgcgtcaccggtttcaccgctcagattcagcatgccttggtcatcgttcgatgggcggctgccggagtacggcctgagcacggcaacggtagtcctcccccgccgttcgcgactgaccacccataggtgttgctgttcgcccagatgcaacagcgtgttgatgttgtcgttgagccgacgattggcgtaggcgagcgcgcgaggcagacgataggagccgatgaatcgatcgtaatcggtcatgaatgtgctgttgcattgggcgatgattgattccagatgctcgcgtgtggcgtaatcgaccttcaatgcgtcgtggatggactgtggggtggattccggtattgtgccgacgccatgcgccaggtccagagaacgcacccagtcccagtcgatggtggtgccatcggcgtccttgggcatggacgccgcccattggggaatgtctcccttggcggcgtcgaaccatgcacggtcggtcatagtgcgaaaccgagctcttcagcggcctcggtgggcaccgggtcttcgcaccagtagtcctcgaggttctcgttggtggtcagcgaacggatttcggcgcgatcgatatacaactcgccgctcaaatgatcggtttcgtgctggaagatgcgtgcgggccagccgtgcagcggctcgctgtggtgtttgccgtcttcatcatcccattcggcggtgatgtcgagccaacgcttgcgcacagcttggtatccgtcgaagctcaggcagccctcgtagaacgaggcggttttgtcgctggtgggtttgtagctcgggttgatgatcacgtggaaggggaattccgcgatttcgcgcggatcatcctcgtcgtcgcgcacgtggtcttcgaccacggcgagcgcgagccccaagccgatctgggtggcggcgagccccacgccgggtgcctccagcatggtggtgtgcatcgtatcgatgagtttggcgagcgtacgcttggaaagctggccattataggccactgtccgttggcgcaacaccggttcgccggcctgcacgatgggcaggagcttctccttgccgccggttttgatgagttgttcgacatcacggttgagttcgaggtcgactttggcgttctttccaaacattgttttttccttagggaagggtgctacagcgcgagttcttcggcgacgatcttggcgaggcgggtgcagacttcgtcggcgtaggcttgggtggcggcctcggccatcacgcgcacgagcggttcggtgccggaggggcgcagcagcacacggccggtgtctcccagcagttcctcctcacgggccacggcatcctggatgcgcttgttggtggaggcggccttcttgtccacgttcggcacgttgatgagggtctgcggcagctgcgggaagtcggcggcgagctccttcaggctcttgccggacttgacgacctcgttgcacagggtcagtgcggtcagggtgccgtcgccggtggtggcgaattcgcggttgatcacgtggccggactgctcgccgccgagcgagtaatcgcccttgagcatttcctcaagcacgtaacgatcgcccacggcggtttccacggtcttgatgcccatatctttcagggcgagcttcagaccgaggttgctcatcacggtgaccacgagggtgtcgtggttgagcttgccttcgcgctgcttggcgcgggccagaatgcccatgatctggtcgccgttgatcatgttgccgtcttcgtccacggcgagacaacggtctgcgtcgccgtcgaaggccacgcccatcacggcatcggtggccttgaccatggcctgcagctgctcggggtgggtggaaccggcgttcttgttgatgttgtagccgtccggcgaggcgttgatcacgattacatccgcaccggcacggcgcagggcttcgggagccaccacggaagtggcgccgttggcgcagtcggccacgatcttcagtcccttgagcggcttgggctgggttttgtcatcgttcagcggagcgatggtggccaccagatgatcgatgtacaggttggtggcagtggtctggtcgtggctcacgcggcccacgccggcaccggtcgggcggtcccagtcctggccgagcacggcctcgatgtcgtcttccttctggtcgggcagcttgaagccgccgcgtgcgaagaacttgatgccgttgtcgggcatcgggttgtgggaggcggagatcacggcacccatctcaacgttgagcacgctggtcaggaacgcgatgcccggggtcgggatgatgcctgcgtcgatcacgtcgaatccgccggcggccatgcccgcagacagggcggaagccagaaaatcgccggacacacgggtgtcacgacccacgagcgcgcggcggcgcccctcaggctgatcgtcttgggtgccggcgtcgccgagcacacgcacggcggcatcgcccaaatccaacgccagacgtgcggtcaaatccctattggccagtcctcgaacaccatcggttccaaacatcttcggcatatgaagttccactccttgtatcgcgttacccgcaccatcgtagtcgttgtgctccaccctaggacccgactcggcaaaaaaccgccacggaatctgctccagaaccggaaatcagcattcaacagccgcaatggcatcacccacaaacccgcatattcatcttgttcggcggatgaatgatgagatacattcgttagcgggcatgccgggcggaccgatgcactccggcacgggaacgaagccatcgcactagtaagaacgggccggcaaacgcgcctgtaaacaatacagcggcaaatacgacgaacggaactacccagcgtacatcgataaccggcaaagcaacaccaaacagaacgacggcgaggaacacgctgagccatgcgatgaacatgcccaacggcatctcctctaccggggtggtctcggccatgaatgcaacgatctattactccgatgttgtggtcagtatgtgcggcagttgctcgtcgcggttgaggaaagaacgcgtttggcagcgaagtagcgtatgccgaccttcctcagtgcgggcgtataccatggtgcaatgcgtcaggcagcggtccaactgccggctcagtatctcggcgtcctgctggcggcgggcaaatacggacgggcaggggaagctcacgcagtaagcgcgcacgccccattccttaccgatgatgacatatcgcggattgttgatgggcgcgagtagctccttcataacgccggcgaacagcacctgctcgcgccgcgaaccgccaatcagcatgacacgcaatgccgtgaatctgcgacgtgtctggcggatcgaggaagtcgttcaccgcttcgcctgccgcgctggtttctaggcgctcaggttccgcagtcgccaaatgccagacattggccaccttatcggggtctgcggccacgctgcggttggcggccatgctgtatgcttcactgcatcagtgtaaggcacgaatcaataggttttgagccccagatcgatggtgagaatgatgccggcgattacggcggcggcgcgcatgatgtttgcgggaatcttgcgggtgatgggcggggcgatgtacccgccgatgaagcagccgatgcacagcatgatggcggccggccaatcgaccgcgccttggatgatgaataccactgaggcgctgatgttcgcgcctgtgccgatcagagttttcaatgcattgatcttgtggaatgggccgattttggcggcatcaagcatggcgagagccagggtgccggcgcccgcgccgaagtagccggagtagatggcgactgccaccacgcccagccatacccaccaggaatcctggctcatgggctgcacgagttgttccggcgggcggtgaggtgcggtaggggtggttgcgcgcttggcggcatcagtggcatcggtggcttcagtggcttcgatgtgcttgagttgcgcggtggcatccgcggcggcctgcttggcctgcatgcggccgcgcggattgatggcgatgatcagcgagctcagcaaaatcagcactggtgcggcgaattcaaagacactcgggtcgagtttgagcaacagaaacgcaccggccaccccgccgaacgcgccaatgaccacatacgtaatggagcgtaccgcttggcctttgagttctttgcgcgcgcccatcacgccaccgatgcccgtgccgaccacaccaacggtgttagaagcgtttgccaatacaggcggaatgccgaacgcgagcaaggccgggtatgagaccagtgacgatgcgcctaccgcatagcccacgaatcctgcgccgattccggccaacagaatcagtagtaatgaagttatggaaaagcccgcaatcattccccatatccttgtcgctcatcgaccggcacattgccggccttgagcgagaatacgctgttgaggattggttgcgggttttatgttggaatgtggacgtagctcctcgcggaagcgattccctcagtcgcctgaggcgacaactcccctcgcacccgaggggagccagaaggaaatcagagcgcttcgttgtattcgcgaaccttgagggtgcggtgggaggatgccacgttttcgacgatcagacgcttcagggcgttgtcggcggcaatgtgctcgtccagccaggcgtcaccgagcttgaccagcgtggcggggtcggcgtggtccgggtacaggccgttgagcagggcctcggccatgtggtaggtcttgttcgcccagatccagtcgacggcctcgaaataccgggcggcgaacggctcggccagatcggggcgcggggtggcggagaagccacgggccacggcttcgagctgggagttggtcagctcgtcgttgtggagtgcctgatcccaagcccattccttggcttgcgtcgtggccatggaggcgcgggcgccgtaggcgaactcgcggttttccgtggtctccttcttggcgagctgcgcgtccacgtcgtcgttggtcatctcgttgacggaggtgagcgcttggacgatggtccacgtgaagttgttgtcgatttcgaggccttcaagacgcacggtgccgtccagcagaccgtgtgcgttggcggcgaatgcggcatcgccctcctcgccatagcccaggtaggcggtggcgagctggaactgggtgtccgagccggcttcggcggcgttggccagggtccacagctcggcggccacgtggcgcagcacatcgtcgcggcgggctggcgccacgtagtggtgggcggtggtgctcatgcaggccagcgcgtaacggaaggtggtggattcggtttccgtggccagaagacgcagggtcatgtccacgaagcgttcggccgggaattcgccgtcacgggtcatatcccagaaggcgagccaggtcacggcgcgggccagggcatcgtcgaaacgatgcaggttggcttcggcgaatgcctgggattcggcgtcgaaacgaatcttggtgtaggtcaggtcatcgtcgttgaccagcacgaatgccgggcgcggcttgcctgccgcggcctcgacgatggtggtttcgccatccacgtcgagttcgaactgctcggtgcgcacgatcttgccggtttcggcgtcttcgttgtagaagccgacggccaggcgatgcggacgcagcaccgggtgttcggccggcgcgctctgggtgagcttcaattcggcgatggtgccgtccgcgtttacggtcaggccggtggcgatcgtgttgatgccggattcctccagccacttggcgctccaggccttgagatcgcggccggaggtcttctccagttcgctcagcaggtcggccagggtggcgttggagtaggcgtggcggttcaggtagttgtggataccttcgaagaactgcgtgcggcccacgtagaatgccagctgcttcagcacggaggcgcccttggcgtaggtgatgccgtcgaagttgacgtaggtgtcgttgaggtcgttgatcggggcgacgatcgggtgcgtggtgggcagctgatcctggcgcaacgcccagctcttctcaccggagcagaaggtggcccaggcgtcatgccattcggtggcttcggcagtggccagcgtggaggtgaattcggcgaaggactcgttgagccacaggtcgttccaccacctcatggtcacatagtcgccgaaccacatgtgggccagctcgtgcagcacggtcaccacgcggcgctcggccagcgcgtcggtcaccttggactcgaacacgtaggagtcacggatggtgaccatgccgatgttctccatagcgcccgcgttgtattcgggaacgtagatctggtcgaacttggcgtacgggtagggcacgccccaggtcttggcgtagaacgcgaagcccttcttggtgatgtcgaacaggtagtcgacgtccttcgcgaaggccttggccaacgactgtcggcagtactgggccatcggcacggtgcgaccgtcttcgttcaggtattcggtgtgccattcggcgtacgggccggcgcagatggcggtcaggtaggagctcatcaccggggtcggctcgaagttccacagacgggtgctttcgttcggcttgtcgccgagggtgccgtcgagggtttcgcgcggatcgtcctcgatggtggcaaccggcatgttggaggtgacgatccagctggcgggagcgagcaccttgaaatcgaaggtggccttcaggtcaggctggtcgaacacggcgtagacgcggcgcgcgtccggcacctcgaactgggagtacaggtagatgttgccatcggacgggtcgaccgagcggtgcaggccctcgccggtgttggagtaacggcacttggcttcgacggtgacctcgttcttctccttgaggtcggtcagttcgatgcggttgtcctggaaggccacggctgggtccagggacttgccgttgaggtcgatggatgtcacttcgtcggcaatcaggtcgaggaaggtcgacgaaccaggcttcgcgttgaagcagatgagcgacttggaaccgaagttcttcgcgccgaccgtcaggtcaaggtcgacgtgatagtgaatcggcgcttcgataacggccttacgttcttcggcttcaatacgagtgagattagaaccgggcatgacttcaattactccttacggtcgtccctggataatccggactacttggtttctacggtttcgacgtcctgggcgatgtcggccacgacgggcacgatcatcggcttgcggtgcagctggcgcgcaacccagctgccgagcgtgcggcgcatggtctgctgcagcttgtaggtgtcacgcgtgccctgcatcatctggtcgttgagctgttcgacgatctggtgacgcaccttgtcgaactcgctttcgtcctcggccacggcgttcaagtagatcttcgggccggtgacgacctcgtggttgtcggtgtcgaccaccacgaacgcggatacgaagccctcggtgccgagaatgcggcgcttttccagctcgtcatcggtcagctcgccgacggaatcgccatcgacgtacacgtaaccgcacggcacggagccgacgaccgcggccttgccgtgatacaggtcgaccacgtcgccgtcttcggccaagaccacgttctgcgggtccacgccggtcttgacggcgatcaggccgttggccaccaggtgacggttctcgccgtggatcggcatggcgcacttgggcttgacgatgttgtacatgtacagtagctcgccctcgttgcagtggccggacacatgcacggcggcgttgtcgcggttgacgaccttggcgccgagctgcacgagcttgttgatcaccttgtagacgccgtgctcattgcctggaatcagggagctggcgagaatcacggtgtcgaactcgttgatgtggatgtcgcggtggttgccgtcggcgatgcggccgagtgcggccatcggttcgccctgggaaccggtgcacatgaagacgagcttgtcgtcctgaatgtcgttggcctgcttcaggtccacgacggtgccttcggggatgtgcaggtagccgaggtcggcggcgatggacatgttgcgcaccatcgaacggccgacgaacacgaccttgcggccgtacttgtgggcggcgtccaccacctgctgcacacggtgcacgtgggaggagaagctggcgacgatgatcttgcgggtggcctgggcgaacgcttggtcaagggccgggccgatggaggtctcgggcttgacgaagccgggcacctcggcgttggtggagtccatcatcagcaggtccacgcccttttcgccgatcttgccgaattcgacgaggtcggtgatgcggtggtcgagcggcagctggtcgagcttgatatcgcccgtgtcgatcagggagccggccggggtcttgacgtagacggccagggcgtccgggatggagtgggtgacgttgacgaattcgaggtcgaaggggcccaccttgagcttctcacggccggcaacctcaaccttggtggggttctggtggtgttccttgcacttggcgtccacgaaggcgagggtcagcttggagccgatcagcgggatgtccgggcgcagcttgagcaggtagggcacgccgccgatgtggtcctcgtggccgtgggtgagcaccagggcgtcgaccttgtcgagacggttcttgatgtagctgaaatcgggcaggatgagatccacgcccggctgctcctcctcggggaagagcacgccgcagtcgatgagcagcaggtgaccgttgtattcgatcacgttcatgttgcggccgatttcgcccaagccgccgagcggcgtgatgcgcatggagcccttgcggtacttcggcggggcgatcagcacggcatcctgctggggtgcggtggcctgccgggtggcgttgatcttacgggacggcgtacggctgttggatccgttggcgttgcggccgcgcgcggaaccgcgacggcgagaattcgtgttcttgcttgttttcttttgttcttgtgccataacctttttgggatttctgttgtggtgcctctgctctgtcatgcaggggcggcgggctggcaacccgtatgcagcgtttcgggcttacagcagtccggcagcgcgcatgccctcttcagccttgtcaagctgagtggcgtcgggaccgatgttcggcagacgcatggtggtggaggggataacgcccttgaccttgagcgcagccttggccatgacggcctgatagccgtcgccattcaacgcgtggacaaggggggcgagctggttggcgaggcgacgggcggtggtgatatcgccgcgatcgaatgcctggacaagctgctgcatggggttggaggcgacgtgggcaatcaccgaaatgatgccgacggcgccgatggagaggaacggcaggaacaggccgtcatcgccggaataccaggcgaggccggtgcgctgctgcttctccactgcggctgcaagatcgccggtggcgtccttgacagccttgacgtgttcaagtccggccagtcggtcgtaggtttcgaccttgaccttcaagccggtacggccgggaacatcgtagacgatgatcggcttttcggcggattcgtcgacggccttgtagtggccgacgataccgtcctgcgaggggcgggaatagtaaggcatgacgacgagcaccgcgtcggcgcccgcttcctgagtctgttcgaccatacgcacggtgtgtgcggtgtcgttggagccggcgccggaaatcaccggaacgtcgacgacctccttgacggccctgaccagctcgaccttctcatccatatgggtgacgggcgattcaccggtggtgccattgaccaccagaccatccgcgccatcggcgacgaggtatttggcgagcttctgcgcggcggcgaaatcgacgctgccgtcggatttcatcggggtgaccatagccggcagaatgcggccgaaaggtgctggctcaagaaggtgcatgtcatgctcgctcatagtgttcaccgtacttcccattgtggactcttatattacgtaccttgattgttgctgaatgcgtggcattatggccggagccggtggcaatgccgtgatgcgcgtcccggcgcgcttccctgcctgaaatgcgggggcgactactggtcgactgcgggtcgattacaggtcgaggaagtggtcgaggccgatggtcaggccagccggagcgtcgccggcgagcttgcgcacggcaagcaggacgccgggcatgaagctggtgcggtcgaagctgtcggcccgaatggtcagctgctcgccggcgttgccgaagagcacttcctcgtgggcgttgaggccgcgcagacgcacggcgtgcacgtggatgccgtcgaccacctggccgcgtgagccgccatcggtttcggtggcgtccggcacgggggcgagtcctgcggccttgcgcgcttcggcgatgccgtgggcggtgtgaatggcggtgccggagggggcgtccaccttggtggggtggtgcagttcgatgacttcggcggattcgaagtatttcgcggccttggttgcaaagtagtcggccagtacggcggagatcgcgaaattaggtgcgatgaagaccttctgggtttcgggcttcgggccgttggcgatggcggatttgacctgggcgagtttctcgtcggtccaaccggtggtgccgaccaccacgtccacgccttggccgatcagggtcagcacgttgttcaggctgacggacggcacggtgaattcgacgaccacatcggtgttgtcggtggtgacctgggtcaggtcgtcgccggcatccaatgcgagcgccagctgcgtatcctcggcgttgttcaccgcttcgaccacgtgcgagcccatgcggccctttgctccgaccaccgaaaccttgatcatgtcttcttccctgtctacccgtacctgcccggcaatgtgcccgggacgttttccaatcggcaatcagcctatcaccgccaagccctcacgccaatatcccgtccacagaatcgagctccctctaacaagccgaaccgtgaagtcgagctccctctgatgagccgaaccgtgaagaaaacgccggaggcgtttttaggtgagggcgaacgacagtgagcaataattcagttggctgaaagccatcatttaattgcgttcgagctggccgcgaagcggactgagggagagacccccggcgaagccgccaaccatccatcaggcgtagcccgattccgtttcacccacgccgcttggccaaggcccatccggccaacgccaatggcacggacgccagcgtgaagatgaatggcagcatcatgcccacatgagggttggaggcgtcaagcacaatgccggccacggacgagccgatcgatgtgccgaccgtgcctgcggtggttacccagctcagtccttcggtcagggattccgccggcaccagatccttgacgatgaggttgccggtggcgaacgtcggcgagacggtcaggccggcgaggatttcgaagacgcccagcaggatgagattgtccattgacagccggaagaacacgtagccgacggtcagcagcgataggaacatcaccatatgcgcccaatgggagcctttgagtcggcaagagccgaacaccagcgcgccgatgcacgagccgaccgcgaacatcgccaattgcagaccgaggaagggctcaagtcccatggatttcatggtggcggtaatggacacgtcgaaggacgtgaagctcatattgaacacgatgaacacagcgagcaacggcagtacgccggcatagagcaatacgctcttgggcttggcgccgctgcgtttgagctggcgcagggtcagctggtcggcatcttcgcttgcagcggggctgccgtcatcgtgcgcggccacggtgacctgttccacgataaccggtggctgggtggatttcagcgagaagaatatggtgccgccgataccgcatgccacggtgggcacgaacagttgggataccggatgcacggaggtggccagccaagccgccagaatcggccccagaataaagacgatctcgtcaatggcggcttccatggcgtaggccgtgttgagcagctgttcgccatcttccacaccgcgcaacgcataggaccagcgggttcggaccaatgcaccaaatgagaactgcgtcagacccatgatgatggccagggcgaacagcagcggaatcggcacgcgcaccaacgccgcgaaggcgaaggcgagcatggccacgatctgcacggcgagcgcaagccggcccacgcgggcttggccgaaacggtcgaaggcgcgggcgtagaacggggtgacgcagctcatggccagcacgtaggcggcgctcatggtgccggcgatggtccaattgtcgtagagatggttgagcgccagaacgatgccgagactcatcatggagatcggcaatcgcgccaccgcgccggacaggcagaacgccttggctccgggcagcatgaacaggcgctggtagggcgagtgggcagcggacgacttcgaaaccgcgcgagtcgtggacacaataactccttacttgtgcgttgtccggcacgtgcgcccgcccacacgtgccatccgaggggtagcggttcccgagcaacgtcacgcggtgcgtttcaaccgcggaccggtacatggccagtcgtcttcatcgtcggagatgccttgcgatgcataaggtctctccgccggtgaaggccgtccgatggtgcacaggtcatgagcctttgggctcagtcgttgtcagattgttcgggaatgccggagctcaactcggtaaggatttcctgtttggttttcgcacgggcgtgaagctcgcgcaagccctcgtcgggctcactgacatagtagagagtggcgtcgatactgtccaattccacaccttcgaccgctgccagcagcagtcggtacatgtcgagctgggcaagtttgcgggtgatgtcgtctggcttggtgggccgacgaccggttttccagtcgaccacggtaaagcgtgcggtggtgctggacgggtcaagtccaccgatgaataccgcatcgagtttgccattgaccaggcccacgcccggcacgtccacgacgatggcacgctccgtccacgccgggatgcgcttggcccacgatgattcggccagtctgcgctgccacgccaccagcttggactcggtggcattgtcgctacttatggaagtggcggaggcggcggatacggcggatgcggattgttgagccgtgggctgtgggacagcgggctgccgtgtggatggcttgcggcattgccgctcccgttcggccaaatcggccaacatggcttcccgggaaacgaatcccgcatcctgacctgtatgcggcatacttgattcggcttcatatgccagtaccgcttcatccggcttaccggcattgatgaattgctcagcccacgcatggaactgcgtgccggcttcggccgccggagacgatattcgtggaatcggacggataatgctacgccagtagaggcgctcctcccgttcgttcatgccacctacgcgggcttgcaggcttgtcacgttctgacgtccgacggccagaatgcgttgcgccttggctttgactgcctcatcaagcgactggccgctggcggcatcggccatcaaatcggcgtcgtccaccagcaattgcgcccgttgcagcagtggaccggcgtcttggtgctgctcaagtgacgaggaatctgcggcgataacatcgatgccacgtgacagctgttcatgcactgcgtcgctgagggtagccggccacggcaattcgacagcggcatccgtctgcgtaatcggcgtttgccatgcctcccccaccacggcgtcaccgtatgccgcggcatgctctccgataaagaacccttcgggagtggcaatcgcttcgccttgcgccgagatcagcatgggcttcccggcattggcggcttgcagccgttccacacagtcctgagccgatatcgcatgttcacgggcttggagcgcgtcatgcacttcaagccagaaattggatggctgagcggcgcgagagcctttgggcaccactgacgggtcccgcccggattcgcccgtataggcgcaataggtcatcagggcatcttctcgcgcacgggtaagcgccacatacatcaatcgacgttcgtcggcatgcagccggcgcccatattcctccgcctgcgtcaaataccagccggatgcatccacttcttccacgccatcgccgaattcgcgcatggagccgaacacttcatcatcgataagctccacatcatccaaagccgccaatgatgcgatggggtcggcttccacatcggcatcatgggggaatcgcggcagaatgccggcatcggcacgcataggcacgggtacggcggtggggttggtgagccaggagtcggcggtctcatgatattcgggtgcggtccagtgaccttgctcggtgcctcccgtatggtgctcgtccagcacgatcttgagatggtcgccctgattgctggggaatccgacggcggtaagccccactaccgcaacggcatcccattccaaccctttggactggtgtacggtcatcagttccacatccaccggagcgtcagggagactggcggcttcatcctccaccgaagccagatgatccacccatgtgatgaacccatgcaacgagggagtttgctcagcggcaatctcttgcgtgtacgtatccaccaaatccacaatcgcatccataggcatatgcgccaaagcgggattggcgcggtgctgcggattatgcagcacaccggccaatacggtgtcgatgtcaagatccaacgcttctatgccggcgcgaatcacgtcgcccagtggccgcccgacggcatcatgcacctgacggagcatcaccgcggcccgggttatggcgttgcgcccgtgtgcgctcaaccgttcaagcagttttaccaggtcgccgcgtagcaatacgtctggcaggaataccgcattggccacctgatcgcggtactcacgcaccacagccgcccattcattcgctggtgtatccggttgggcaaggccggcctgcaccaatgcttggaagcgttgttccgtgttctgttcttcagcaaaacgggccaacatggtcaaatccgctgcggacatggtgaatcgtggcgtggccagcaagcgcatcagcgatcccgtatcggtgtggtcggcggccacgtgcagcaacgccatcagatcgcggatttccggacgttccaacagcgcggaatagccgaccacgaatgtggtcaatccggcctgttccaatgccgcctgatattcgggcatatgtgatttggaccgaaacagcacggcgaccggcgctttctgttcgcccggcatctgttcctgttgttcggctgcggaacggtgccgtgcgatggccgtcttgcagaaacgcactacggcgtcgatctcctgcccggccgtggcgaagcccagtactcccaatgttccttcgggggcatcaggcatggggtcgagcgatgagacatcgacctcacgcatcaatgagctggaaggacgcgacggattggagcgcaacggcagcgtgagattattggcggcttcgagcactatacggctgtttcgcctggtgacggacagcgggaatggcttgtatccggcagacaggtggaaatcttgctggaacatacggaatgcaccagggctggcaccacgccatgcgtaaatcgactggaacggatcacccaccgcgttgacggcggacctctgtgacgcatccacgtggaacagtgctgccagcagagcggcctgcgtggtggaggtgtcctgatattcgtcgagcagcacgtggctgtacctgcggcgcgtacgctctccgatggaggggaagcgctcgataagctgatacgcggcaatggtgaagtcggagaattcggccatattgcgttcccgcttggcttgggcataggcctccaccagctggagcagaatatcgcgtttgcgtgtggtctccagcagcgcaccgcaatgataggtgcagcgggcgtgcaaatgttcggcacggtcatcgagcttggcttgccagctggcgtcggtatctttcttcagtcgtttgatcttggggattttcggctcgtcctcgggcatgggttcatctgcaacggcttgttgcaatcgattgatgaatgccgaatcccattgccgtactcgattgatcgcatcatcgaagctggtgcagccggcaccgatcatggcactgccaatggcatccgacaacgccagaacacggttcgccaaactggagaaggcgccaaaatcctcactgaacgccagatccatgtgactgtcgatgacttcggtggccagttgaagcgctccggctgcgctcaatggttgcgtgttctgatcgaatccgacaagcagtccatattggcgcacgatggtctggaagaaggcgtcatacgtgaaaatggccggcttgaggaatgcccgatcagacaccgtggcggtcgtagagcccgccatatcaccggccactgcggcggagacgcgttccagcagttcgcctgcggccttgcgtgtgaaggtcaggccaaggatgcgttcaggtgccacacctcgattgataagcgcgatgatgcgttgggtcatcgtaaaggttttgccggaaccggcaccggcaaccaccaatacgtcagcatcgactggcgcatcgatgatggcggcctgttccgcactgggagtgaacgtgctcatgcttgcctcgtttcgaaaatcgtgtcgatctggcctgcacaggcagggcagacgttcttcatacggcagaatccgatatgggtgtcttgcggatgggcctcgatgatggctgatctgctggccgccgcggcatagaatacgcgggcgatcatggtcagcgaccataacgtctgcgtaccggcgagcgcggcgaattgcgcccacgcttcggcactcacaccttcgggaggagtagccggatctatggcgggtatgtcgaagaaacggttggggtctttataccagtatcggggcgtgaacggttcggcattcaacgagccatcagtgaacagcggcggctggaaggcaccttccggagcgtagcttctggctggtgccgcattctgcccgacatggaatagcgcgctttggctgatatgcggcattgcggcaagtgccttggcaccgcgcggcccgtcttcggggaacacgaggccaagctgatagcacacgagctgcaaatcattgaaaatctgtttgaccgtgggcgttctgcctgttttgtagtcaatgaggcgaatgtattcgccgccgtctgcgagtacgcgggtttccatacggtcgatgcgcccggacagtctcacggtcagatgctcgtccatgccttccggccaccctccgaccagtgctcccatcagacggaccagcgtgttccgaccgattgggtgcaggccgggcacggcattgtatgcgtcgagtatgtcacgcacatcgaatcgtgcggcaaactcccgttcgcattcggcaccggccaatgcgccaatgctgaagttgctggagttcttgccaagatacgtttccggatcggcgtcgctgcgcacaaagtaatcggcgatgttgcgcagggtatccgccgcggactcgtccttacgggtggcctcatagcggttccgggtgtcggctatggcattcggatcaggacgtttgctctgatagatggcattaagccgtgccgagacagcctcgatgcgacgttccgtgccggccgtggagtccaagcccagtgcggccaacgcctgggcattgtgggaaagatggtccagcccttcctcgctgccttgctgcgcaaccgcatggatgagggttccgaaactggtggccacggagctggggcgaggaccggcgaaccggttctccagcatccagcacaccgggcacgcccataggctgtcgaccgccgatggagataaggtgaccatgggcgcggcctgcgcatccgtcttgcctttccctgtttggataccgtcaggctgtacaccaccagatgacgcgctgtcggatgaggcactgtcagatgaggtatcgccagatgacgcaccgccagatgacgcaccgccagatgacgcgctatccgattgggccggcgattccacaaacgcccagctctgcggatttgcggcgcgcacaccatgctctaacaggagtgtcaacgcaatcgcggcgtcctttgcggcagcctgctgcggttgagcagtggccagaaccgcgcgggcggcgctgaccaacccacgtgggtcggcgtccaatccggccagatcatattcggcgaatcccgcatgtgcccccactgtggtgaaaggcgcctgttgccggttgcgcggatagtattccggcagatacccgaagagaaagtccgaggggctcatgctgtcgttccataccgcgctgatcatgattcgccgtgcacgggtcagcgcgaccaggaaactcttcttctcgcccgacaatacagccgcgaaccgcggatcatgcccggttttgtcgctttcttcaagcgctcccctcagcacgagctcggcaaggtcttcaccaccgaacatggtgttgcgcccggcgaggttcggccacacgtcttgctggaccaccggtatccacgcatattcccagtggcgtccggccgcgcctgccggcgtagtcaatgtcaccgcgtcttccaccggtcctatgtgggccaaggaatcggcctgcacttccatgccccgaacctgtgccatgaatgacgtgatgtctcgactggcggtggaatcatcggcgaactggaacaggcgcattgccgcgtccagccggtcattggccgtacgcccctctgccgtgttgaataatgccgcacgctgccagaccggtgccagaccggtggcgttccacgcaacagacagcgcatagcgcggctgtacgcgctggcttgccggcagccgctccaagccggaagcaacgctgcccaccagatgccacaggttcgcaaaagcgcgggcctgagggtcgttgccgagcaccgcgtggatggatgcgagcgcagcctgcgccggcgcggcggcatcatcaatggcaagcatcacgtacagcgcgtcaacgccaaaggccaagtcatcgccggacggttcaccgagtatttcgacagacactggcaacgaagtcactgacgacgaaaccgctgacgtcgaaaccactgacgaggatgtttcacgacctgtttcacaccgtgtttcatggtatgtttcacgcaatgtttcccatgccgtcgtcagagaggtcagcatggcatcatccgtggcgagatgcgccagcgactccaacgaccccatggccgattcgatcggcgcaagccttgcgggacgcccctgaccaggtttggccccggcactcaccaacgggccgttcatcaacgtggccactctagtccttatatatgccgcgcaggaagccaacgtcatctggcattccgccatcccctcggcacgcaatcgggcaagctccacaagcgcgaacaatccctgcacgaaagtctcgtccttcaaaggacgggtgaccgacgaataccgcaccggcacaccatctcggcgcagtcgttcgccgaacagccgcacggcggcattgtcgtgggtgatgaccgccatgtcgttccaccgaatatgccggtcaagatgcgcccgcttgatgcgccagaccacatcatccagctcctcacgtgaggatcggtacaggccggcggtcaccgtgccgtccgcctgataattcgctgcatcgactccgcccagtatggcggtcagcttgccgggacgctcggccggaggcagcggctcgtcttccggcgagggaatcgacagcgaaatacgagacgcgatcacatcagccatcgtcatgtgcgactgatcagcgacggcactgccgccaaccagctgttcttccttggccttcagccgcccttccacggcacggcgcatcagatattccggatacgatccgcggaaggtctgcaccgattcatccgggttgccgaccagcaccaacttgacgccggcattccccaactcctccaagaagcgcatgccggccagcgtggtgtcttgaacatcatccacaaccagcagccggggcaagcccaacgcctccacacacataggccggccggaatcatccgcgtgatcggcggcgaatgcctcacgcaccacacgagcgcctgccaccagcaaatacgaggcatccaaacggtattgccccggatataccgcgctttgggctgcaatatattcgcggcgcaacgcgaaagccaaacgccattgcaccgacaatcgcgcgtcctccgtcacggcgtccaagagacgtggctcttcgtgaacgcctacaccgagctcatccaatcgggccagcatatcgcgcaactggctgataaacgcatctgaaatacctcgcgtgaacctatccgcgctggtcgagccgcctgccgacgtcggagacggcgaatccgacccttgttgcgagaggcttgattgtgcagaagcggccgagccgggcatctcgccggcaccggcatcgcgtatgagtctcgcccagtcatcctgggcaaagtagacgcgcagcaaatcacaggtgccgcaatcatctcccgctacggcatggcgcagatgcacggccatgacttgacgcagcaaagcatcctgttccgcaccgttcagcaatcgaggcgacggcaatccagttccctcgcgcgaagccgatatggcccggaatgccacggcacccagcgtggtgaccggcctggcctgcacggaaaacccgagctcacgaatcacccgattgcccaatgcgtcggcggccacacggccggatacggccatcaccgcctgcgtgccaccgtagcggcgcagccccgccatcaacaccgataaggcgaattcagttttgccgcttccaggcgtgccgacaatcagcctcgccgctccatcacggtcgatgccgtccagcactgttccaggttcaagtctcgtcatcatggctccagcctaaacccgaccgtcacagagggaaaaattttaccgaacccgacgaagaatcgtacccttgacggtatcctgtagaacgaatgcagggagagcgcattttccaaggagggagggaacagatggacaacattccgatgagaccgccgaagctgcccggatatgatttcgtccagatgttgggaagcggtgccaccgccacggtgtacctatataaccagcgtatgcccgcacgcccggtggcggtaaaggccagcgccaaaacccttgacccacgggccgctgccctgttcaaccgcgaggccaacttcatggccaagctgtcatcccacccgtacattctgccggtatatggtgccggcgtcacctccgatggccatggctacatcgtcatcgaatatgcgccgggcggcacctacaacagcatcatgaaggcccggtccatgacctgcgagcaggtactcgacctcggcatcaagctgtcaagcgcgctgttcaccgcgcatcgcagcaatatcatccatcacgacatcaagcccagcaacattctcatcacctcgcagggcttgcctgttctgggtgatttcggtatctccaccgatgtgtatgaccgcaccgaaaccggattctcgccgccgtgggcaccgcctgaggtgcttcagcatctgaccaatggttcggaagccgccgacatctattcactggcggccaccctgtacgccatgttcgtcggctgctcgccattccagcacgattatcacccgcgttcgcaatcggaactgatttcgctgatcgtcaaccagccattgcctcgcctcaaccgccccgacgtgccggccgatgtggaagcggtgctgcgccgggccctgaacaaggaccccgaccagcggtactactccgcgttggagttcgcacgtgccatgcagcgtgtgcaattcgcatatttcgggcatgccactcccgttaccgtggaagggatgccggcctatcccaaagacatcgagcgtcggcgccgggccacggaccagcgagatcagatcacccgttcgtcacggcgatgggtcaaaccggtgggtattaccgtcggtatacttgcggcgatcaccgcagcggcactgatattcgccttcgtggtcgttccccgcatggacagcgccaccggatcagataccaaacaggtggcgacgcccggcaccaaggatgatgacaacaaccgcaataatcaggatgacgtgatcaccgataccgcgaacgcccagattccttccccggagaatctgaacggcacctatgcggcggatgggtcatccgtgacgttcacctggacgaatccagacccgcaaagcggtgatacctatgcgtgggccatagtgcagggcagcaataccgaccagagcgcgcaaaccgtcacaacgtcagatcccacggtgaccgtcaacgcgcaggaaggctcgcagacctgcattcaggtgtccattgtgcgcaagaaccgccagatgtccgtcagccccgccatcgcctgtgcggccaagccgcaagaatgatccgctcgccactgccgggcatgccaccctggcattgcgtatcgcatcagacgtgcgcccagcagcggcgaattcaccaaatggacaacaggaacggcaggtattggaaccgtaaagcgttgtcattacaccagcaaccagagaaaacaggggtcagggagttcagatggccacatcgtcccagtcatacgatcgtcgccgacgcatcagcgcggctttgcgccgccttatgccctccggagggcatacgtggacggttcccgtaatcacgctcctgctgcttctgggacttgttgccggcgcggtgatcatgagcaccgtcacgcgccgccatgtgcaactggacgatggcaccgtatgggtcacttcgctgaaaaaccagaaggccgcacgattcaacgtaaagaacaaggaggccgacgccggcgtctcctcctccgccccacgattcgacatcgcacagcataatggcgacaccatcctgaccgaaacgaccaaagcctccaccatcaaggcatccacggtcagcaccggtgtcaagaccgacatcaaagccaacaccaccactgtggtcggcggggataccgcagccctgatcaacgagaagaccggcaatgtgtggaccggcttgtcggaaaaccttgattccgtgacccccaccacttccgatccgaaaataaagctgggcgagggcgggcgcatcgcagtaacccacgatggcaaggtctacggataccgtccatccgacggtatggtgctgcgtcttgacaatcccagcagcgccaaggccaaaaccctcgaatcgctgaccgacggcaagcagcagaccgttgaaagctttaccgtcatcgggagcacgccggtaatcgcaaccggcaaaaccgtcatattcaagggcggccgcgtcgatgtcgacacgaccggcaccctcacccttcaggagcctcccaccgatgacatacagtccgattgggtggccgcggcatcaccgagaggccttgcgcttatcccgttgaagtccaatgccaaggcgaatttcatagccaacgggggcaaagcgaatccggcacgaccggtatcgtccaagggctgcgtgtactcggcttggagccagaaggccagcaactacattcgcgtctgctcccccacggataccagcgtcaagccgcaaaccctcgaatccgtcaacactacttccgaattggtgttccgcaccaaccatcgccttgtggtgctcaacgacacggttaacggcaatgtgtggaaccctgaggattccaccaaagtcatcaaaatacagtggaacaaaatacagaccgagcagaccgagaaagaacagcagaacaacgactcggccaacaaccaccacgacttctccaagacctgttccgcacaatccggccaaatcaaagccgaggatgatgaaatcggcgcacgagccggttcggaacagattctcgacgtgctgcgcaatgacgagcagaccgattgttccgtactgaaaatcaccaaggttggcgcaccaaacaacaaagacgtcaccatttcaccgatttacgacggccggtatctgcaactcgatgcctccgccgcatccgcaggcaccgttacctttacttacgatatttccgatggccgcggccaaacctcttccgccacggtgaccgtaaccctgaatgatggaggcaaccacgctcccgtacagttcgacactcctcccgagatcgatgtggagcagggagccagttataccgccaatgcgctgagcagcttcaacgatccggatggagacccgctcactctggtctccgctgtggcccagaacaccgaccaggtgcaggtgtccacccgagccgacggccagcttacgttcaacaccggtgcgctggcgtcgggacgcgtgggcgtcgaggtcaccgtctccgacggcacggcgaccggcaccggcatggtgtatttctcggtcaagcccgcgaacaccttggccgcggtcatcgacccggtagcgaaaaccaccgttcccaacacggataccgtcgtcaagctgtcctcttacgtgcatggcacttccttgcagccggcacagctgactcaggtggatacgcccaacggcgcttcgacgaccaccaatgcggcggatatgtcgttgacgttcaaggccaccaatcccggcacctattacgtgccctacaccattgctcaaggttcgattccggccaccggattggctcgagtcgaggtacagcccgccaccggcgaggccgccaaaccggttgccgccaacgatatcgccctgcttggcgcggataataccgccattgtggagccgctcaccaatgacgtcgatccgatgggcggcgtgctatccgtcaccacggtgagcgcaccggccgactccggcatcaaggttggtctcgtcagccataagcgcgtgtatattaccgcgcgtcaggtgcccacgaagcccgtcgcccttacctacaccgtggccaacgcctccggaaccgccaagggcaccatcgtgttgcagccgccggctctgaccacctcgaattcagtgcccaaggccagcaatatcaatgcccaggtgcgtaccggcggcatcgtgtccgtggatgtgcttgaccatgtggcctactcggatggcaccacggtcaaactcaagaacaacctgcaatacgacaaggagacgttcaagggtctggccttcgtctctggagacactgtccgctaccaagcatccagcgagaccggcaacttccccatcacctatacggttgaagacaatctgggtaatgtggcttccgccaatatcaccattaccgtgcataagagcgacgcagcgagcaaggccgcgccaaccccgcatgacgccgaagcgcaggttgccgccgggcagaaggtccgcatccccatcacactgaccggcatagacacggatggcgacgacgatcagctgttgggtctgggcaacaaggcacccacgctgggccgcatatccgaagtcggttccgactacttggtctatgaagcgtatccggattcgtccggcaccgacaccttctcctatgccgtggaggattggaccggtcagcgcacacaggcgcagatccgcgtgggcgtattccaaggatcgtccgactccggcgtatacgccagggacgacgaaatcacgttgaggcccaatacggccgcaaccgtgccggtcgcgcagaacgacatctccggcgacaacaccaatctgaccgtcgacaagcatgtcgaggtccaaggtctcgacggggtgagcgtgaaagacaatatgatctccttcaccacgcccgacagcgccaccaccgactatatcgcctacacggtcaaagacaaggccggcttgtccgatacggccaccctcacggtaaacgtggatccgaatgccgccatcgagccgcctaccgcctacgactatcgcgtgccgtccgccgccaccatcgataagaagtccgtggatgtggatgtttcccagtggatcgccaatccttccggcacagccaatgagctcaaggtcggcgtgcatccctccgccagcgctcacgctcacgtcaggggcggcgagcattcgaccaccatcaccgtcgacctgacgtcacaggcgcgagccgtgccttacacggtgaccaatacgaaatacaacatcacctccaccgcgttcatccaggtaccggcctatggtgtctttccgcccacgttgcgtcccaaggcaccggaattgaaggtcaactcgcgcgagaccattgaaatcaacatcaatgactatgttcgcgtcggcgccggcaaggaaccgtatatcgaaagcgctgattccgtcagcgccgccaaggcttccaactccgatttctacgtgaacgacaagaccctgaagttcactgcggcaaaagactacgcaggccccgcctccattacctttaccgctgtggatggcaagcagggatcggataagaccaagatcatcaattccgcagtgatcactctccagatcacggtgataggccgcgatgtgccgccgcccacgttctcgtcctccactattgatgtcgaggcgggcgcggaccccaagaccgttgatctgacggcgctcacccatgcaccgtccggcgtgtatgacgacgaaaagcaatacacgtattccggcggaagctcatcgtccaggcaaatcaccgcaaacctgtcccgttccggtagcttgcaggtttccgccaccaaggatgccgctcctggcaccaccgcgtccattcccgtgcaaatcgcatacggcgcgggcaccgtgaatgccggtgtgaccgtgcgcgtagtgtcttcgacccgtccgctggcacgcgtcggcgacaagacgttgaagatcaaggccggtgccagcgatgccgtgaacgtgcttaccggcgcgtacaatccgttccccgattcctcgctgaccgtcatcagctgcaaggcggatgacgccgccaaactcaccatcgccggatgtgatgcctccggaaacgtcaccatcgccgtcgcatccgatgtgggtgcttccacgaacaccgtgctcgtcaccgtgcaagacggcaccaagtccaaggatcgtgaagtcaccgcatcgattaccgtgtccgtgatcgacaagcccgagccgccactgctctcccccgtagccggggaaccgcaggacagcgcggtcagcctcacatggacgcccggtgccgccaatggcagcccgatcaccaactacaaggtcagttggaccggtgccgccaccggagagaaggattgcggtgccgtcacctcatgccaggtcactggtctgaagaacggcaaaacctattccttcaccgtcgccgcgcgaaatgacgtcggctggtccaagccgtccaccgccgtcgaagccacaccggacaaggtgccgtccgctcccaccgatgttacggtcacgggtggcaataaaaccgccaaggtgacgtggaaggcaccgagcggtgatttcagcgccgtcgataactattcggtgaccgtcaccggtgcaggtgctccgcagaccaaggaaaccggcaatacggccaccgagctgtcgtttacgttcaacaacaacgacatttccgatggcaccgccattacggcgaccgtcaaagcccataacaaaatcaattggagtgccgagtccgccgtatcgccgtcagagaagatctggggagacccggatgcgccgaacattgcgttgtcgaacgacgacaccacagtaacggcgaaagtcactctcggcaacaaccgcaatgccggctgccggcgaatttccctgggaggagacgtcaaggacaccatcgattgcagtgacagtgacactacgttcgatatcaatgagaacgatttgaacacccgggaaatcaccgtaacagccaccgtggtgccgcagcgcgatgcttccgccggcacgggcgagagccgctttgtcccgcagtacaaggtccagccgcccactgacgtctacaccaccggatccggcagtacatgcaccgtgcattggaccaagcagggacatgcgcagtcctacagcgtgactgccgatggcatcgattccggtacagctactaaccggaactcactcgacttccgaatgagtccttgggcccaatgcaacaccgcatcggtgcaacaggtgttcaacggcgctaccagcgatgccgccaccggaggcccgcacaatggcgctccttacacctatgagaagaaggctgtaatcaacaaaccgcaggagctacgctggtcagacaacgctcacgtcattaacgtcaccggcggttcggttgatgtctatggcaagtcggccactgtacaaatcatcatcaatggccaaccgttcacatggaactccggccagccattggatgtcaccgacttggccgtggccgccgatggcaactacgcgtggagcgtcaaagtcaccggcgggccgggatactccggtctcgacaacactgcggacggaggcagcgtcgcgggcacacgcccctctgactcctcggaggggaccaagtcgctcaaatccggtaccgatgtcaccactttggccaagaacccctggattcttggtttcggcaataccccaatatcgtcaaccaccattcacaagcagtaggagaacatccatgagcgagaacatcgacgacgcgacgcagttgtctgacacgacccgtctgtccgacagcacgcagctatccgacagcacgcacttgtccgacgccacgcacctggcatccgcaccacacaccggcacgaccccaagcaccgagtcggcgccgcagtccgttgcgctgcctaacctgccgcagcggccgtcacaagcgccgtcagaaaagccgtctcctactactgatgccgcctccattcctgcgggcgatgacagcaccgtgctcaagccgcgcaagggatcgacgccagccatcccgcagcaggccaccgcgcaatcccagccgcaatcacagccgcagcgtcagtcgagcaaagccgcgcaagcagccgcatcggcactgcccgccagcatcaattccggactactgccccagcccacggctcaggtccgggatttccagcagtccttcaatgcgctggtcgaaaatgtctccaaggtggttatcggcaagaccatccctatcaagcaatgcgtcaccgcactgatggtcggtggccatattctgcttgaagacaaccccggcaccggtaagacccagttggcccgaggcttggccaattccatttccaccggtttcaagcgtgttcagttcacgcccgatctgctgccttcggatgtggtgggtgtgactttctacgatcagaagcgcggagaatttgagttccgcgaaggcccgattttcgcctccatcgtgctggccgatgagatcaaccgtgcatcgccgaagacgcagtccgcacttctggaggttatggaagagcagaaagtcaccgttgacggcgtcacacatgatgtgccgcagccgtttatcgtgatcgcaacccagaaccccatcgagcagctcggtacctataagctgcctgaggcgcagatggaccgattccttatcaagacgtcaatcggctacccgggccatgatgtgtccgtcgatatcctcaagcaggtcgatatcaccgaccgtgcgcagaccatttccccggtgctgagcggtgacgatgtcatgcggctgcgtcaggtggccaccgaaatctatgtggatgatgcgattcgtgaatacatcgtcaggctcgtcgaggcgacccgccacaacgagaagatcacggtcggctcctccatgcgtggcgctttggcactgacccgatgcgcccgtatctgggccgcggccgatggccgtgcctacgtggtgccggatgacgtcaaggaccttgcagtggccgtgctcgcacaccgtatcacgctgactccggaagccaccttcgatggcgcgactccggaaagcctgatcgcacaggtgctcgaagacgttccctcccccaccatcggttcctgatagggcccggaaaggtatccgaccatggcatctacatccgccgcattacgccgtcgccggcgcgctgaacgcatgttcaagcgcgcggtaagacgcatcagacggttcttcgcatcctacgtctcgcccttgggctgggcggtaacgggcgcaggcatcgcatgccttattgcgttcccgtttctgggctggtatgagctgctcgtattcggcatcgtggcgatggtgatgatgctcgcggcaatcgtgctttccctcggcaacacacgcttccacgcgtccatcgtcgtatccaatcatcgcgtgaccgtgggagacaccgtatccgttatcgtcggcatcgacaacaccggcagaacgccgacgaccacggcacgcggatatctgccaatcggcgatgcgcatgaacgattcaacatccccatgctggctcccgggcaatccaagcaaaccgatgtggagttccgtaccgtatcgcgcgcaatactgcccatcggcccattgcgcatccgcaagggagacccgttcggtctggtgcgtcacgaaaaggagctggccgaccgcatcaccgtattcatccaccctcgtaccgtgcgtctcgatactctgaatgccggcgtgccccgcgacctggaaggccaaccatccggccagatcgtggatgatgatctcgacttctacggattgcgcgaatacgagccgggcgacgacgtgcgtaacgtccactggctgagctccgcgaaaaccggcacgttgatgattcgccaatatgaggccacgcgccgcaccgacacctcggtgaccatcagcgtgaacccggacgaatacgtcaacggcgaggaattcgagatggcggtgtccatccactcctccatcggcgtcaaatgcctgctgcaggatcgtccattgttctgccacgcgggcaacgcgcacggccagccgcgcaacgccatggagttcctcgacaacgccagtgccatagagcctgatcgtgaggataatccgaatctcgccgagggcacgctgaagcacagtcctgatgcttcgttctattttttcactgttggatcgctgaaagacatcgagcaaatcaagcgcatgaccttggccttgccccgatcggccagctgcgtggtattgcaggccagcgccggcgccaatcgcggcatcagaagattcgccaacttcacattggccaccatcggcgacctcgatgatctcccgctgatcatgggggtgctcgcatgaccttcgaccagtccagtatcaccaataccaataccgctgcgtacgccggatcgagcggcacatacaccggcacttcctccggcacgtacaccgggacctccaccaccaccggctcctgggccgactccacacattcggttatctggatgaccagaggcaatgtgcttcgcggcatgggcctcagtcgccagccgtggggcaaacgaatcgccagcctcgtactcatagcggcggtgatgttgctggcgcaagccaatctcatcgacgtgtacggcggcgtggccacttgggcgattgccgctgtaccggccaccttgctgggcgcgatcatcgctctggcgggcatgttgccggcgttgcgactgtggtggcaaatcgtgtttctggcgtttgcccaattcatcatcggcccggtggtaacgctgagttccactacgtcccattacgtgattcccaccttgaagaccttgagttcaggttgggaaatgacgtttggctcgttcaagtacattatttccgtcgatccgcctctgggcacgcaagacggcgtgctgatggcggtatggaccatcggcctgtggcttacgttcttcaccggcgtgtttgccattaatgccaacgcatggttgtctctggtgggagtgctgccccttgcggcggccgtggccgtatgtgccctgctgggcacagacagcggctggcaacgcgccatctgcggtattgcctttgccttgctgctgattatctggctgtcttggcgtcttgaactgctggaatgggggcgctggatatccgcgctgatcatcgtcgtgctcgctgccggccttgctttcgggggcacgttgctggtgccacaggaccgtttcgtgctgcgtgaccgctacgatccgccgttaagcccctacgattacaccagcccgctcagcggcatgcgatcctatatcaaggaccacaaaaaagacgtgttgctgaccgttcataatctgccggccggaacaccggtcaaacttgcggtgatggatcgattcgatggcacagtatggaacctgtccgattcttccgaagccacggactcctcgaattatcatcgcgtgggcaccacgatcaaggcggatgagcagggtaaatccttcactgcgaccttcaccgtcgatcagggactgaccgacacctggctgccgctggcgggagcggccactggcgtgagcttcgccaacgatgccgacaacggcaatgacacgttttactacaacacggataccgattccgccattattcccgccggcacgcgtaaaggcctcacctataccgaatccggcattatcgcccgtaatcccaccgataagcagatcagcagtgcggctgcggcccgcatcacccaaccagaagcccaggatgttcccgattcggccagcaaactggccacgtccattgccggcgggcagtcctcgggcggtgccgcagccacggcgttggccgacacattgaaagactccggatggttctctcatggacttgaaggcgactatccctccgatgccggccatggcaactaccgcatcaacaagctgctggcaggcacggccatggtgggcgactccgagcaatatgcctccgccatggcactgatggctcgtgatctgggactgccctcccgtgtggtcctgggcttcctgccgaaaaacgaggatggcgaaatcaccgatgcccgcacggagaagacctcaggcaatggcaccaaaatcgaattcaccggcaacgatgtcaccgcttgggtggaaatcaaattgcagggcctgggatgggtggcgttctatccgacgcccaaggagaccaagatgcctgatgaaaaccagaacctgacgccgccgaatccgcagacgctggtccggcaaccaccagtgccgttgaccgatccgctgcgcgatcagacgcaagccaagggccaaagctcattggccggcgccgacgccgatgattcgccgaccaacctgttctgggcgcggttctggcgagtgacccgcaaggtggccctgtacggcagcccattgtggaccctactcatcgcctgcggtctgattctgatgttcaaggccatactgctggcacgagcgcggcgacacggcagtccgaaaacccgtgtggcagcaggttggaatgccatacgcatgcttgccgagcaaagcggcatcacagccaagggcactcgtcgagatcaggccggtgccatcgcccgtcaactcggcacagatgaccaggctttgatccagcttggccgggaagccgactacgccacgttctcggggcaagacattgaatcgggccaagccaccacatattggacaggagtcgaccaattacgcaaggcaatgctcgcttctttgccgcgtttcaggaggatacgtacacgactttccctgaaaagcgtggctatactgtcaaatgggcacgcagcaaagccgcacacgacgcatgtcaagcgcacgcgtaagaaggggaaggcgtcatgaccacaggctccatccgtatcgcgatgaccagtgacgtgggtcttaggcgcaaaaacaaccaagacaccggattcgcgcaacaaggcgtgttcatggtctgtgacggcatgggcggcggcaaaggcggcgagcaggcaagccagttggctgcccagcatttcgcacaattggccgccatgccttcacgcacccgtcaggatatcgacgacaccttggcacgggcccagcacgacattctcgatctgggagaccgccttggcggcgtggccggcacaacctgctccggtttggtactgccccaagatcatgcggattccgccagcgcccgcagcgctgctttgttcagtgacgccgatgatcaggacttctcggaccagacctatgtggtcaatgtcggcgattcccgcacctaccatctcagtccgttggcgcatgccgatgctcccgccacggatatcattcccgtgtgggacgccgcttcgctgacccgcatcacgcgagaccattcccagcgccaagaagccatcgattccgggcagatgttgccggaagaggcggaggcgaccattccacgcaacatcatcacccaatgtctgggtgatccggatggcatcatgcccgacgtatatgtcgccgatctgaccggccgcttcatcatctgttcggatggattgcatggcgaggtgccggacgaacagatcgcggccatcgccgcggcgcattccagtccgcaggaggccgtggacgccttggtggcggccgctcttgatgcgggcggaaccgacaatatcactgtgattgtggccgatatgccattgaccgaacccgaacatcatgcgttcagcgcattcaggctggacgaaggtgaggatatcggcgccattgaagacgcaacactacaaacactacggaccatacgttcggcataaccgagcgaacataaggaggtaatcccatggttgattatgatgctgcggtcgctgccgtacaagatccgaacgcggatccgattctgttggcaaaaatcgcctacgagaatccggaattcggtgccaatgtcgccgtgaatccgcgctgttatcccggcttgaagcgttggatcgccgagttcggtgacgatcgcgcccgcgagaccctggcgcaatacgggttcactgccgaggcattcggcggcccggttcaggatcagaaagccacggcacaggcggcccagcagcccgccgccaaacaggctcagcagcccgcggctcaggcggcattcgaggagcctgtggccaccaatccttacggtttcaccgccgaacaggccctgaccaccaccgaccagatgcaaatcgcccagattgcccagtacgcgcctgaactacgcgcctgcatcgcacgtaatcccaacacctatccggcactgatcgaatggctgggccagctcggcgacccggcaatcaacgccgctctggcttcccgtcagtgaaaggacggcatcatcatggccaaacttccctaccctccagcacctgaactgggttggtattctgacgatccggtggaaggcaccccggattccgcagttggcacagccgaaccgcagaacgactacgggcagcccagtaccgcggaagcggcaaccaataccgcttttaccgcagagcctgccgccacggccgccgccgctgagcccgctgccaccgctccggcagacaccacaccgcacgccgccgaaaacgacatcgaggattgggacagcaccgtgctctcctcctcgttcacgtccaaggcaccgaagaagacgtacctgctgcataacgatgtcaccggccagaccatcgtgatcgataagagcacgttgctgggccgcaagccttccatggatgtgccgcagggtgccaaggcggtgcgtatcgtagacccgacccgcaccacatcccgcaaccatgccgccatcagcatcgacaccgatggcgcgctgtggatcgaggactacggctcgttgaacggcacctacatcatcaccaatggccaagagacacaagtcaccaagggcacaccgctcaagctcagcgcgcctgccacggtgcgtatcggagaccagttcttccagttcaccgaaaaacaggcttgagtaatcaagcaacgagcggctgcctgctcttgttcaacaggaaaatcacaatggcaaatatacggatggcccggaactgatatagttccgggccatcttattgcgattaacgcaagatctgagtcctagaaggagcatcctttctaggaccttctcacttactcctcgatgtcaggctgaccgccctgatcggagtagaaatcatccgggttgaagtcgtcgccgagcttcagatcgccgaactcgaggttcgagaagttcaggtcagacaggtcggcgtcggagaagctcgcgtcgccgagatcgccatcgccgcccagaccgaagttcgggtagatggtgtcgcggatagccttgtcaggctcgaccacggcgttgcggtagcgcgcgaggcccgtaccggccgggatgagcttaccgatgatgacgttctccttgaggcccttgaggtcgtcgaccttctcggagagggcggcttcggtgagcacgcgggtggtctcctggaaggatgcggcggacagccaggagtcggtggccagcgacgccttggtgatacccataagcgccggacgaccgacggccggacggccaccgttcttgacgatgttgcggttgatctcgcggaagcgggcgttgtccaccagctcacccggcagcaggtcggtgtcgccggagtcgatgatggtcacgcgacgggtcatctggtgcacgatgacctcgatgtgcttgtcgtggatatccacaccctgggagcggtacacggtgtgcacttcctccacgatgttgacctgggcggcgcgcttgccgaggatggtgaggatcttcttggggtccacagaaccttcgaccagctgggtgccgaccttgatgtggtcgccgtcggcaaccttgagcggcacgcgcttggagacctggtaggtgatcggcttgatcacgccgtcttccttcggtgcgccggaatcggcgtccggggtcaggatgatctggcgaccgcgatcgttctccacgatcttgatgctgccggcgaactcggtgatcggggcctcacccttcggggtgcgggcctcgaaaagctcggtgacacggggaagaccctgggtgatatcggaggccgcggccacaccaccggagtggaaggaacgcagcgtcagctgggtaccaggctcaccgatggactgggcggcgacgataccgacggtctcgccgacatcgaccagcttgttggtggccagggaccagccgtagcacttggcgcacacgccgcgcttggactcgcaggtcagcacggaacggcacttgacttcctcgacgccgtgggccacgaggtcgttgagcacgtccatggacagggcgtcgtcgcgcttgtacagcacggtctgtccgtcggccgggtcgatgacgtcggcggcgagcagacgggagtacgggccaccgtcggcggccttgacgagcaccaggttgccgtcgttgtcgcgctcggcgacgcggatgggcagaccggccttggtgccgcagtcctcttcgcgcacgatgacgtcctgggagacgtcgaccagacgacgggtcaggtaaccggattctgcggtacgcagtgcggtatcggccagacccttacgtgcaccgtgctgggagatgaagtactccagcacggacaggccgtcgcggtagttggacttcacaggacgaggaatgatctcacccttcgggttagccacgaggcctcgcatacctgcaatctggttgatctgcatcatgttgcctcgtgcaccagactgcacgatgatggccaggttggaggtcgggtcgaacttctcctcgacttccttggacacttcggcggtgcactcggtccacaggtcgatgagttcctgacggcgagcttcctcggtcaacagacccatctcgtagttggcgttgaccttgtcggccttggcctcgtactcggcgatcttctcgtcgcgctcgggcggctcgttcacgtcggagaacgcgaaggacacgccggaccacggtgcgcgggtgaagccgagatccttcagggcatccagcgtggcggccacctgctgggtggagtaacgcatggcgatgtcatcgacgatcttggacagacggcccttggccacctgctcgttgacgaacgggtagtcggtcggcagggtctcgttgaacaggatgcggccgtaggaggtggcgaacagcacggtgccgtcgtggaagcgttcttccttgacgacctcgtcctcgccttcgcgcgggtcgagcaccttgacttcgccgggctcccagttcttcggcagcacgaagctctcgggcaggcggatgagcaccttggcctgcatgtcgatctcgtggcggtcgagggccatttcggcctcttccagcgaggagaacacgcggccctggcccttggcgccttccagcacggtggacaggtagtacagaccgaggatcatgtcctggctcggcatggtcacggtgtggccgtcggccggcttcaggatgttgtcggaagccatcatcagcgagcgggcctcggcctgggcttcggcggagagcggcaggtggactgccatctggtcaccatcgaagtcggcgttgaaggcggcgcaggccagcggcggcaggtggatggccttgccttccaccaggatcggctcgaatgcctgaatacccagacggtgcagcgtaggtgcacggttgagcagcacggggtgctcggagatgacctcctcgagcacgccccatacttcggcatcgccgcggtccacaagacgcttggcggacttcatgttctgcgcatagttcaggtccacgaggcgcttgatgacgaacggcttgaacagctcgagggccatcggcttcggcagaccgcactggtgcatgcgcagggacgggccgaccacgatcacggaacggccggagtagtcgactcgcttaccgagcaggttctgacggaaacgaccctgcttacccttgagcatgtcggacagggacttcagcggacggttggaggcaccggtgaccgggcgaccacgacggccgttgtcgaacagggagtcgacggcttcctggagcatgcgcttctcgttgttgagcatgatttcaggggcgccgagctcgatcagtcgcttcagacggttgttacggttgatcacacggcggtacaggtcgttgaggtcggaggtggcgaagcggccaccgtcgagctggaccatcgggcgcaggtccggcgggatgaccgggatcacgtcgagcaccatggcctccggcttgttgccggtggtcaggaaggcgttgacgaccttgaggcgcttcagggccttggtcttacgctgttcggaagcgtccttgatttcctcgcgcagttccttggagatggtctccaggtcgagggactgcaggcgcttcttgatggcttcggcgcccatgcagccgtcgaagtaatcgccgtagcggtcctgcatctcgcgccacaggtccacgtcgtcgaccatgtcgccgggcttgagcttcttgaacttgtcgaagacggcgtccacacgggcgatctggtcgttgtagcgggtgcggatggcggccatatcgcgctcggcaccgttacgcagcttggtgcgggccgggcccttggcctcgccggcctcctcaagggcggcgagatcctcttcgaccttcttggcgcgggcttcgatgtcggagtcacggcgctgctcaaggcgcttgatctcggaatcgaactcgtcctgcaggccgggcagatcgttgtgacgctcgtcttcgttcacctcggtgaccatgtaggaggcgaagtagatcacgcgctccaggtccttcggggtgacgttcagcaggtagccgaggcgggaaggcacacccttgaagaaccagatgtgcgtcaccggggcggcgagctcgatgtggcccatgcgctcacggcgcacgcggctgcgggttacttcgacgccgcatcgctcgcagacgatgcccttgaagcgcacgcgcttgtacttgccgcaggcgcactcccagtcacgagtcgggccgaagatctgttcgccgaacagaccgtccttctcaggcttcagcgtacggtagttgatggtttcaggcttcttgacctcaccgtggctccaaccacggatgtcatcggcggtggcaaggccgatgcgaatcttgtcaaatgcgttgacgtccagcacttgttaatccgtttctgttcttgagaccttcccaagctccccttgtcaggggagctgtcagccaaggctgactgaggggtagtgcaaaccggaaaggtctctgtacgttatttatttcacgttggcggagctacacgcggcgtattgaccgcatgcagcccgagggatcactggtattcgggctcttcggccttctggtcttccttggcggccgcgtcggggcgggcgccgatgttgaagccgaggtcgtcagcggagctggccggatcgtcatcctcatccttcatgtcgatggccacgccttcggcgttgagcacttcgacgttcagggacagggactgcatttccttcaggagcaccttgaacgactcggggatgcctgccggcggcaggttatcgcccttgacgatggcaccgtagacacgcacgcggccgtcgacgtcatcggacttggtggtcatcatctcgtgcagcgtgtaggcggcgccgtaggcctcaagggcccacacctccatctcgccgaagcgctggccaccgaactgggccttaccaccgagcggctgctgggtgatcatggagtacgggccggtggaacgagcatgaatcttgtcgtcgaccaggtggtgcagcttcagcatgtacatgtagccaacggaaatcggcttggtgtacggttcaccggtacggccatcgaacagggtggccttgccgtcggggccgaccagacggtcgccgtcgcggttcggcagcgtggtggacagcaggcccttcaggacctcaggcttgacaccgtcgaacaccggggtggcgaccggggtgttcggctcggccttctcggcaccggacggaatcagcttcttccactcggcttccagattcggatccaaagagatgtcccaaccggagtgagcaatccagccgaggtgcagttcgagcacctggccaaggttcattcgggaaggcacacccagcgggttcagcatgatgtcgaccggagtaccgtcagccaggaacggcatgtcctcttccggcaggatgcgggagatgcagcccttgttgccgtggcggccggagagcttgtcgcccaccgtgatcttacggtgctgggcgatgtagacgcggatcatctggttgacgccgttgggcagctcgtcgccgtcctcctcggcatcctcacgggtgatctccttgacaccgatgacggtaccggtctcgccgtggggcacgcgcagggaggtgtcacgcacctcgcgggacttctcgccgaagatggcgcgcagcaggcgctcctccggggtcagctcggtctcgcccttcggggtgaccttaccgaccaggatgtcgccggcctcgacctcggcgccaatgcggatgatgccgcgctcgtcgaggttggccacggcgtcctcgccgacgttcggcaggtcgcgggtgatctcttcggcgcccagcttggtttcgcgggcgtcgatctcgtactcctcgatgtggatggaggagagggtgtcgtcctgcacgaggcgctgggagatgatcacagcatcctcgtagttgtagccgttccaaggcatgaaggcgatgagcaggttcttgcccagggccaggtcgccgttctggatggcggggccgtcagccataaccgagccggcttccacacgctcgccgtcgtggacgatcgggcgctggttgtagcaggtggtctggttggagcgctggaacttggccagcttgtaggaactggtggtgccgtcgtcattcatcacgcggatcaggtcggcggacacgtaggtgaccacgccgtccttctcggacttgatgacgtcgccggagtcgttggcggcgcgccattcggagccggtgcccaccagcgggcgctcggattcgatcagcggcacggcctgacgctgcatgttggtacccatcagtgcacggtggccctcatcgtgctccaggaacgggatcagggaggcgccgagggagaccatctggcgcggggagacgtccatgtagtccacggagctcaccggcacatcgaccgcctcttcttcgccgactcgggcaagggcggacttctgcacgaagttgccgttctcgtcgagctcctggttggcctgggcgatgacgtggtcaagatcgcggtcagcggtcatgtactcgacctcgtcggtcacgtggccgttgacgaccttgcggtacggggtctcgatgaagccgaacgggttgacgcggccgaaggttgccagggagccgatcagaccgatgttcgggccttcaggagactcgatcgggcacatacggccgaagtgggacgggtgcacgtcgcgcacctccatggaggcgcggtcgcgggacagaccgccggggcccagtgcggagagacgacgcttgttcgtcacaccggacagcgggttgttctggtccatgaactgggagagctgggaagtgccgaagaactccttgatggtggcgttcaccgggcggatgttgatcagggactgtggggtgatggcctcggcgtcctgagtggtcatacgctcgcgcaccacgcgctccatacggctcagaccggtacgcagctggttctggatcagctcgccgacctggcggatacgacggttgccgaagtggtcgatatcgtcgacgtccacgcgcaggtcaacgtcttcgccgttgcgcttgcccgggaaggtcgccgcaccgtcgtgcagggccaccaggtacttgattgtggcgatgatgtcttcctggtggagggaacgatcgttgaaatcggcctcgacacccagcttgcggttgatcttgtagcggccgacacgggccagatcgtagcgcttggtgttgaagtagaaggagtccagcagattcttgccggcctcgggggtcggggtgtcggccggacgaatcttgcggtagaggtcaacgagggcctcgtcctgggtctcgagggtttccttctccagtgcgtcgagcaccagcgggtagtccttgaatgcctgggcgatctcggacttggtcatgccgatggccatgaggaacacgatggcggactgcttgcgcttgcggtccacgcgcacctgcggctggtctttcttatcgatctcgaactcgagccatgcaccacggctcgggatgatcttcgcgccgaagacttccttatcggaggtgcgatcctgctggcggtcgaagtagacgcccggggaacgcacgagctgggagacgatgactcgctcggtgccgccgatgatgaaggtgccgtgcggggtctgcagcgggaaatcgcccatgaacacggtctgggacttgatctcgccggtgtcgccgttctcgaattcggcgttcacgtacagcggagcggagtaggtgtaatccttctccttgcactcctgcacggtgtggcgcggctcctcgaagtacgggtccgagaaggtcagggacatggtctgtgcaaagttctcgatcggggagatctcgttgaagacctcgtcgagaccggaggtgtgggccacggtgttggtgccgttagcctcatcctcttcgacgcgcttcttccagcggtcggagccgatcagccaatcaaagctgtcggtctgcacgcccagcaggtagggcacatcgatgggttccttgatggaaccgaagttcacgcgatccgacgccttgtgcaggtcaatgtcatgctggtcggcgcgtgcgatgatggtggtggtgttcgtcgtagactcagtagccaatggacgttccttatcgctcgctaatatgtggtaattcccctgggagcgccggcatggccaccatatgcctatgcggacgcttcattgtcgacggcatgcccgcaatatgacacacctcatgcaaagtcaaaagaatagcgctaaggcaagacttttactgcaccgtaaacgtcaccggatcgctcttcaccttgggatgatccttcagactcagctgagccacatacgttcccgcgttcacgcgaggccagtccgcctcatccgtgcactcggtcagcgcggcattggaatcggcattccatttgagctgctgaatgtctttgtctcccttggccatcaacagcatgcgggaatccgtggcgcacaaggcggaggtatagacggtttgctgaccggaagtaatggtgagcacgcggcccgcatcggatccatcgaccagacagctgtcggaaccgtcatgcacgatcttggcggtgaattccaatgacccgccaaccggcacggattgggacgccgagctcagatcaagcgacagatccttggccgagcaatccttaacgccgctggttttcttcggcgtcggcacggtgtcgcgggaaatggcatacacctcgtcatgatgaattgccgtgttgatggctccgacaccacggccaaggctgtagacgcaaaatacgattaacgcgagaactaacaccaatgccacaccaaccacgatgcggcggcgacggtacatcgcctgcttcttcttactgatggtgcgctttgtggcagcacctgccttggcagaccggatggtctttgcaggtatcgcggttttggcagtcctaccggagcgaacgggattggagaacttccgagaagcagacttgcgagaggtgtttttgccgcgagacatcgggcggccccacccgccacgaccgtctccggcgcttttaggattcgcacctgacttattcctctgcactgccataacctcttcagtgtacggtcgtcatcgccatacacgcacggcagtcccatattttcacagaatgtcagccaagaccaatattccgctcagcgatatcatccgctcatccacgcgtacgctctcacacgtgtgcggttcaaccactttatagcactgtgcggaatcagccgtggggcagacgaagggcaccattctccagaatctcgatcaacccgtcatcatcaaggctcgcgatgcaggagtcgagctgaatctggtctttccataggttttcggcatccactctggcaagcgtgtcattcgccggcaatgcgcgcaacgccgcaagcaccagtccgcgcacctgacgatcagtgccttggaatcgctgccgcgggcgggtgcgccgctcccccagtccggggcggccggctttgagaaatgcacaatcatccgcaatcgggcaaatctcgcataacggcgtcttggctgtgcaaaccaccgcgcccaattccatcaccgactgattccacgtgaccgatggaggttcgctgcgctgcaggaaagtgtgttcgccggatcggtatacatggtccgtgcaatcggcaccgtccccacgaaccctgtcttggggcaacatgcggttggcgagcgcgcgttcggccgggctcgccgctcccccgcgagattcgatgccgaggaatacgcggctcagcacgcggcgaatattcgtatcgatcaccgcaatgcgctcaccgtatgcaaagctcagcacggcggaggcggtgtagtcgccaataccgggcagagcgacgagctcgtcataggtacgaggcagctcatcgccatattcttccgccaccacgcgggcgcattcctgcaatcgcagcgcacggcgaggatagccaagccggccccatgcggtgatcacatcggctttaggtgctgcggcaagagcgcgggcgtcaggccagcgtgccatccaatcgttccaatacggcactacacggctcatctgcgtctgctggctcatgacttcggataccagcacgccccacggcgtggcccggccgaagcgccatggcaaatcgcgcgcattggcctcccaccatgcgcccaatcgcaaagaaattgctgtgtcgttcatcgttcttattcttagcagctatgacgaacgaagcagaacagaattcgcagaacgcacagaatcccgaaacaaaagtcgagaagatgttcgagtacgggtaccgtaaatcgaattacggaccggacgaactcgtaaccgacgcgcatggcaaccccatctccgtggtggacgcgatgctctcggctgaaaaggccgccaccaccgaaaccgtaacaccgcatctgtgctactactcaccgcgcattcccggcaacaccggctcggccatccgcctgtgcgcggtgaccggcaccatcctgcatttggtggagccgttgggtttcaacctgcgcgacaccaagctgcgccgagcaggcctcgactaccacgacatggcccacgtggtgctgcacccgaatttcgacaacctggtggagtccatgcccaattcgcgcatcatcgcgttcaccgcacatgctaccaagctgtacaccgaggtggaatacaagccgaccgacatcctgctgttcggccccgagcccggcgacatccccgacccgatggacatcatggagggccctcatgtggccgaacaagtgcgactgcctatgcgcccgtccttgcgttccctgaacctcaccaattgcgcgtccatcgccatctacgaagcctggcgccaactcaacttcgctggaggacgctgaggagaaggcccagtgggccttcgagtagcgacgccgaacgaacgccgacaggcgtgagagaggaaaccctgagcctcgcagcacgaccatcatcgcagaaaatgggtctatcggcgcttcgaggggctgatttggcatctgccggaggtctattgccgcttcgaggggctgttaaaggacgaaaccccgagtataggcgttgaaatatcaacgcttgtactcggggtttcttgattgaggtacccctctgaaagcagatacctatctgcgcaaatgtacctctttgaaggcagataccctactgaatcagttcttgaagctgtgaatcggagcgggaatacgaccgccacgggtcacaaaggcctcgcagctggtctggttgaccggcatgatgggcgcgtagcccatcaggccgccgaagttcgccatctcgcccacgcccttgccggcaaccgggatcacgcgcacggcggtagtcttctggttgaccatgccgatggcggcctcgtcggcgatcaggccggagatggtggaagcagaggtatcgcccggaatggcgatcatgtcgaggcccaccgagcacacgcaggtcatggcttcgagcttctcgatggtcaggcaatcggaagaagccgcgtcgatcatgttcttgtcttcggagaccgggatgaacgcgccggacaggccgcccacgtaggaggacgccatgatgccgcccttcttgacctggtcgttgagcatggcgagcgccgccgtggtgccgggagcgccgacctgttcgaggccgatcttctctagcacttcgcccacggagtcgcccacagccggggtcggggcgagcgacaggtcgatgatgccgaacggaatgccgaggcggcgggatgcttcctgggccacaagctggccgacgcgcgtgatcttgaacgcggtgcgcttgatggtctcgcacaggaactcgaagtccttgcccttggccgcatcgagtgcgcgggagaccacgccggggccggagacaccgacgttgatgaccgcgtcgccctcggtgacgccgtggaagcctccggccataaacgggttgtcgtcaggcacgttgcagaaggccacgaacttgacgcagccgtaggagtcgttgtcggcggtacgctcggcaacgtccttgatgatatggccgagcagttcgaccgcgttcatgtcgatgccggtcttggtggagccgacgttcacggacgagcagacgatgtcggtctcggagagagcctgcggcagggagcggatgagcagctcctcggccggggtcatggacttggaaacgagtgcggagtagccgccgatcaggtcgacgccgacttccttggccgccttgtcaagcgcgtgggcgatcttgacgaaatcctcgctcgtcttgcaggagctggcaccgaccagtgagatcggggtgacggtgatgcgcttgttgacgatcgggatgccgtagtcgcgttcgatggccttgccggtggaaacgaggtccttggcataggtggtgatcttgcggtagatgttgtcgcaggtcttgtcgacatcgtccgaggcgcagtcgagcaacgagatgcccatggtgatggtgcggacgtcgagcttctcctgctcgatcatctgattggtctcgtggacctccatgatgttcagcatggtttgttccttacaggatatttaaagactagtttggcggtcaccctcatcagagggataaggatggctccgtcagtggaaagcccaccgggctttccacctcctcgcgtgaggcggcctgctgagcgggtcgcctcaaatacggtgcatcttggtgaagatttcctcacgctggcagcggatgcgcacgccgatgtcgtcgccgaggtcctcaaggttgccgaccatcgcgccgaagtccttgtccgcgttggcgtagtcgacaatcatcatcatgttgaagtaaccgtcgatgatggtctgcgagatgtcgagcacgttgacgttgtgctgggacaggtaggtgcagactcgcgcgatgatgccgacggtgtcctgaccgacgacggtgatgattgccttgttcatggctctccctggtcgtatacaaaaagcgggtgactacccaagtatagggaagacacccgccatttagcattgtgatttattatcatgcctcgcgtgaagcggatttcgccgcgtacgcggcaagcgcgcgcggtgcgtggaagccttgcttttcgaattcgtcggcgatcttctgagcgacttcctgagaacgacccttgtccaccaacgcgatgatggagccaccgaagccgccgccggtcatacgcgcaccgtaggcgccgttcttgcgggccacgtccacggcgatgtccagctcggggacggtgacctcgtagtcggcggccagcgaatcgtgggaagcgttgaacagacggcccgcagccttgatgtcgccctgagcgaaggcacgcacgaaggaacgcacgcgctcgatttcggtgacgacgtggcgcacgcgcttcttcatggtctcgtcaggcagggcgtcaagcgtttccttgagggcctggaactggtcatcggccttggagatgccgtcggcggtaacgcgcaggttggccacaccgagaatcttggcggcttcctcgcaggtggcgcgacgctgagcgtactggccatcgttgagctggtgcggagcctgggtatcgaccacaagcagctcgaggttgtacttgtcgaggtcgaactcctgctgggagacgttctccagcggggtcaactccgggcggcagtcaagcagcagcgcatggccggcggtgcaacgcatggaagcgttctggtcaagaccgccggtggaggcaccggccatctcgttctcggacttgatggcggcgttgatgagggtcacacggccggcgtcggaatcgccgtagccgaggccgtacacgtcgtccagagccagagcggtggagcaggtcatggcggcggaggagctcaggccggagcccagcggcacgcaggagacgaaggcggcatcaaagcccttgaccttgtcgaaaccagcctgacgcagcgcccaggccacaccggtcgggtaggcggaccagccgtccacgccacgggccttgaggccatcgagatcagcttcggcgaccttgtcgggagccacgccggagacgacgcgaaccttggtgtcttcgcgcggcttcagggcgatgaaggtgcggtgcggcagagcgatcggcaggcacaggccggcgttgtaatcggtgtgctcaccgatcaggttcacacggcccggagcagcccacacgccctcgggcgcagcgccgtaggtgtcgacgaacagcttggtagcttgcgagacgccttcctcatgggtcagcggctcaatgaattcaacagcagtcattgatgttttctttctatcagtcggcgatgtcgatggagccgagctcgtggaagcgcttggcgatgagttccggcgtggtgtcggagatccaggcggccatgccggattcggagccggcgaggtacttgatcttgttggcggcgcggcggaaggagaagaactgcaggttcaggcggtagttctcacggcgcttgtcgtgcaccggggcctggtgccaggcggcgatgtatggcaggtccatgcccttgccgtcgcccttgtcgaagaaggcgttgccgcgcttcaggaggtgcgagtacatggaggcaaggtcccaacgctcttcgtcgttgagctggtcgagggtgagcacgtcgcgcaccggagccacgtgaacctcgaggggccaacgggcggcggccggcacgtaggcgacccagctgtggttgcgcatcacgatgcgttcgccggcttcgagctcggcgttcatgatgtccttaagcaggttgccgccggtcttctcgtggtaggcctcggtgtgctggagttccttctccatcttcggggcgatgaacgggtagcagtagacctggccgtgcgggtgggcgagggagacgccgatttcctggccgtggttctcgaacgggaagatctgctcgatgccttccatcttggagatttcggcggtacggaaggcccaagcctcaaccacggtgcgcaggcgggagaccggcagatcggccggcaggccgtcctcgttcgggtcgaagcagatgacctcgcagcggccggcggcgagcttcttctcccacagcgggttgccgtcaacgtaggtcacgtcctcggagacgccgggcacgcgcaccatggaggggaagcggttctcgaacacgacgacgttgtagtcggtgtccggcacttcgccgtcctggtacgggtcaccgggcttgcgggcggccagcgggttgcccttggcggtagcgccggggccggcggtgatcgggcggttcatacgggcggtggccatcgggatccagtcgccggtcagcgggtcgcggcgcatctgcggggcggcgtacggcacttcgttgccgtcggcgtccaggtgcggggcgaaacggtagtccagcgggcgcgggtccttgagctcgcgggtcttggcaccggagacgaactcggggtcgtcgtccaggtagaagaagtcacggccgtcggcaagcgtcgtcggcgtgatgcggatgtgctccttcgcatactccccgggggtgtagttggcgaaatcagccatgggtttactcactttcctcaatggtctcgctctggtgggccagcacgagttcctttaccaaatccttggttttggcggcggagtcgggatcgagcccgtcgtcagtaatgaccgtgtccacctggtcgaagcgcgcaaacagcgacagcgatgtgcagctccacttggtgtgatcggtcaaaactatggtgcgatcggcgatgtccatcatcgccatatcggttgcggcttccagcgaattcggcatcaggaagccacggggaatcgacaccgagtgggtgccgaggaatacggtgttgacacgcagcgaggcgacgaccttgtccgcgatcggaccgacaagcgagttcgatcgggtgatcactccgccggtgacgatcacctccacgtccttggattcgagggcctggaccagttcggccacgggaatcgaattggtgaggatggtgatgccgctggactgctgcgattcgagcagatgctgggcgaagacataggccgtggtgccgccgccgatggcgatcacatcgccgggagccacatatttgatggcttcctgggcgatggcgtccttcaggccgatatccatctgggacttgacagagaacaggggttcgctgagcaaggtactggtagtcaccgcgccgccatggacgcgcttcagcagtcccttgtcggcgagttcggcgatatcgcggcggatggtcatcgctgacacacccagttccttcgatagcgccgtaatgcgcactgccccgcgcgtgcgcaacctgctcaagatgaggtgctgacgttgtgacgaaatcatgtgaacattatcgcacacaaaagctcacaaaccaaaccggcttgagcgttttggggacaatctctcgaaaattccgggcaattcaggtgttcatttccacaaaaccgcgcaaaatcgcacattgtgcgaaccgatattctcgcagcgaccactagcgcgatagctcacgaccgacgactctcccgagcgcgttgctcagcggcgagtcacgcctgatacctggtgcatcccgattcatgtatcttctgccgagccgacgcctgcgtgcgcctcgacacgcggtagccccttccccaattcgcctaggcaggaatcgcctagccgcaccggcccaagcgtgagacaataggcggtatgacttacgtttctgaaagcttctggcacgacgccgtcaacaaagccaccaccgatctgttcaccttcggctacaaacacatcatcaaaccgaacttcgtgttcaaccaccgccccgatgaggcacacgatcagatgatcgagttctgccacgtcgtcaagaacgtcccgccgctgctgctcgccgagcagctgatgctcgactacaccgaccccattctggaaacgaatgtgatgggcgtcgatttcaccaacccgttcggcctgtccgccggcctcgacaagaactgcgacatgcccgtggtgctggaccatgccggcttcggttttgaaaccgtaggctccaccacctcgcgtccctgcccgggcaacgccaagccgtggttccaccgtctgcctgaatacgattcgatgatggtgcacgtcggcctcgccaacatcggttcggacaaggtcatcgagcgcgccgagaaggcttggactcaggcccgccagatgcagctgtctgtgtcgatcgcccgcaccaacgacgaccagtgcggcgatttggacgaaggcattgaggattactgcatttcgatgcgccgcgccgccggccgcaccgcgatggtggaggtcaacgtctcctgcccgaacacgcacgtcggcgaaccgttcaccgcgactccggaagcgctcgaccgtctgtttacggcgctcgacaagatcgaccgcccgcagcccacgctggtcaagatgccgttgaacaagccgtggggcgagtacaaggagctgctcgatgtgctggccgagcacaatgtgcaggggctgtccatcgccaatctgcagaaggaccgcaccggcctcgagattccgcgcgattgggagggcggcctgtccggcggcccgtgcaccaacgccagcaccgagctgattcgcaaggtgtataaggagtatggcgaccggttcgccatcgccggcatcggtggcgtctttacccccgagcaagcctatgcgaagattcgttccggctccagcttggtcatgttcatcagctcgctgatgtaccgaggcccgcagcagattaccgtgttgaagcgcggtctggcccagctgctgcgccgcgacggattcgagcacgtctccgacgccgtcggcgtagacgtggagtgaactcacatattgccctattacccatggggcggtaaaaccctcatggggcggtgattgtcccatggggcggttagccaaatttcacattccgcagaataccgccgttttgggttaccgccccatgagggttttaccgccccatgggaaagttaccgccccatgaggatttagtacgcaccggccacgtattgcggggcgtaggggatctcggtggacggtatgcccagcttgttggctgcacgcaacggccagtatggatcacgcaatgcggcgcggccaatctccacggcatcggcttcgccatgggccagaatcttggccgcctgcttcggcttggtgataagacccaccgcggtcaccggaatatcggccttggccttgacctgctcggagaacggcacctgatagttcggcttgaccggaatcgacactcccgacatgatgccgccggtggatacgtccatcacatcgacgccatgctccttcagcaccttggatagtgcgatggtctggtccaaatcccaaccgccggcggcccaatccgtggccgaaatgcgcaccagaaccggcacgccctcaggggcggccccacgcacggcatccacaacctcgaccaggaaccgagagcgaccggtcaaatcgccaccatattcgtcatcacgctcattgctcagcgggtcaaggaactgagaaatcagatagccatgcgcagcatgaatctgaatagcctggaagccggcggccaccgcacggcccgccgccgcggcgaacgcaccgaccagaccatgaatctcatccacggacagcgcgcgcggcgtacgcagcccgccgaacgcgatttcagacggtgccatggtgggccagccgcccgcctcctccggcacactctgaccgtcgtaaccaacggcgaagcaaccggtcgaagccttacgccccgcatggttgagctggatggcaggcaccgcacccgcctcgcgaataccgtccacgatccagcgccaagcatcaatctgcccgtcttcccacaggcccagatcgcacggcgtgatacgcccctcaggagccacggcggtggattcgacaatcaccatgccgaatccgccgaacgcgcgagacacgtaatgctggtagtggaacggcgtgggcctaccatcgcgggcgaacgacgaatacgtgcacatcggcggcaaccaaatacgattacgcacggtcacctcgcgcagcgtcattggcgcaaacagccccggacggtccttgctgactttcttatctgccttgctcacagcttccctttcctcataatcctcataatcatcgaacgattcgctcgtcttgcccgcgccggcccgcttcttggaccgtgcatcggattttgacttcttcttaccgtgcttacggttcttcgatgcatcctcgtgcttggtcttcggctgcttggactgatcgccgtccgaagacgaagccagcgtcaccgctttgagatccggcacgtcgaatccacgaaaatcaaaattctcatgcgtcagatcgtcgttgctcatcgttcccctttccgatgcacgttcatggcaaatattcgatgaacgcgatggcgttgtcattaagtattgtaaaacgggcgtcacctgaaacaggtaacgcccgcaaactacgtaatttgggtatcgcagtcggccatgttacgcagactcagccggcatgcaatcaccaaatgtcaaacgccaattaccaatcactggccatcattcgactgctctgaattggtgccctgggtttgggtgttgttttgcccagtgttctgcgactgagactgattgttgctgctctgcgattggctgttgccattcgtagtggtctgcggcacgctgaacgttcgtccgccaatgcccagatacttgccagtcgtggtgtacttcgagacgggctggccgtaatcgttgtcaatcggtattttcttcttggaaatgtagctattgaagaagttggtaacggccggagccgcgattgtcgaaccatcccaatagctgttgtaccggccgttgatggcaatgttggaaatacggttggtgtacgggttctgtgcatcgccgaccacagcgaacgccgcaatctgattaggaatgaacgatccaccggacaccgcaagatcctcactggtaccggtcttaccaaacgacttacgcccgtcagccaatctgaatgaccaaccggcaccatccggccgcaccgtaccttggttcagggtataagcgagtgtttggatgatgtccttatccaccgcctgatggcagttcgcggatggaaccttgagatcgttgccgtccttatcggtcaccttgctgatggcaatcgggttgcattgcacaccattcgaggcgtatacggcgaagatgctcgccatggtcagcggggacacattcaccgagccgatcatcatggatggtgtatacacctgggttttgtcgatggtctcacccgtggcggcgtcatggtatcccagttcagtcgcggtgtccgccaccttgcacagtttgaggatggcacccatggaagcctgagtagtgttatgcgaacggaccagaccgaggaatgggctttctgggttcactgtacctgcgcccatggcgttcgacacgttccacgaatcggcaccgcccgaatagttactgcaggcgaagtccgtagtggggtatgacgtcgaggtctggaggttgtcgttgatggaatggcccgcttccatccacgcaatcaggttgatcggcttccaggacgaaccgatggtccaaccagaaccaccgccatccgccaaatcgacggcatagttctggctcgtcttggtgggatcgttcgcggctgccggagtggcgtcatagtaacgattcaggccaaagctcagcacttcgccggttcccggtttgactgcggccatggctatctccatgccgctgggatcgtccggtggaatggtattacgcgcggtctccatcatcgtggaattcgcttccacatccagcgtggtgacgattttcaggccaccctcctgcagcagcttgttacgctcggcacgagtcttgccgaattcttcggagttctggatgcgatgcaccacaaaatcgcagaagtacgcgtaatcgccggtgtcctgacagccgacattcacgtcctgtgctttcagcgtgtccttcaacggcgtgttcacagcttcggtgtactgcttctgggtgatgtatccttcctgcagcatcagcttgagcacgatattgcgttggttttcgctttccttctggttctcttcgaccagcggatcgtacaggcttgggttcttggtgatagccgcgatggtggcggactgcaccacgttcaaatcggcggcggacacgctgaagtagcgctgggccgcggtttccacgccatacaggttgttgccgaactgggcgatgttcaaatagccctgcagaatctcggccttggaatacttcttttccatctgcacggaaatcagcatctcgcgaatcttacgggcgatggtgtcttcagtggcatggtactgggcgatcgaatcgtcatcctcgatcgcctgcatcagcagcacgttcttgacgtactgctgggtcagcgacgaaccaccctgctgggagcctttgacgaggtaggtctgcacgaacgcacgcatcacgccttgcacgtcgacgccggcgtgagtccagaatcgacggtcttcgcgcgccaccactgcctgctgcatggttttggaaatcttcttcagcggcacgacgatacggttttggttgtagaacgtcgcgataacggtggaaccgtctcgcgcgtacatcgtcgacttctggggcagactagtcacgtcgaagtccacgttttctaccttgagcgacggaatcaccgctttggcggccttattggcaccgaccacacccggtacaaacaacacgctggccgccacgccgccgcagacggcaagcatgatataggccaagaggagaacaagcacacgttggagagtgagggacttctttttgggcatgggccccattctaaatggggtgccctaccaaccgggcttacggtcagctcccgtgaacatatcatcacaagaatcgcactagcgtaacattggctggaagtcagccgaacggtcagcgccgcgagcgtcgaatcagcataccgggctggaagatgatgatcgatcggccgtcacgtgcgatccatccgcggttggaaaagtccatcaacgccttgttcacggtctcacgactggagcccaccagttgggccagctcttcctgagtcaggtcatgcggcactttgaggccctgttccaccggctcgccgaaacgtgagcccaagttgagcaatgtcttggccagacgcgccggcacatccatgaataccaagtcggagatgcgttcgttgttgccgcgctggcggctggccatgacctgcaacatgtcgatggccacacgcggatgctcatcaagccatgcgaacagggcatcatgctccagccagaccacgcgcgtgccatggctcatggacaccgcggacgcggtgcgcgggccaccatgagggtcgaataccggaatctcgccaagcacttcgcccggcgcgtggatggacagcagctgcacgcggtcatcggaagaagtgcgaatcagcttgacgcgcccctgctccagtaaatacatgcgctgatcggtatcgccttcggagaagatatagtcgcctttatcgaacgtcgcatgcttcaaatgcggcaacagctcctcggcttcggctggcgatacctgcttgaacaatgccgtatgcaacaggatgttttcctcgtcagcaaaagcgtttggcgtttccaagctcatcgcaccatccttattgtcctatgaccgtcgtcgcccatccgtcatattgtaacgcgtcccacaggtttcgtcaggagcatgccctcattcgtcacttcatgtgtggcacgatccgatagccgtacgacatgctgacgaatgcgttaccgcgaaaaacggcactgtcgcggttaccgcgctcgcccatgacaaaaccgcgcacggccaccggcaaaatcgtatacggccatcggtgaaatcacgccgcaaaccagtcaataaggtgctcgacgatgtgttcgcggctgagacccgtctggcttttcatcgggtccacgcgtttgaccgctgatttcaccgctttgtctgacatcttctcgcgactggtgttgagcacacggctcatcttggccgcatcgatgtcatacgccatggtcacatggtgcagcaccgcgccgcctgagcctacggggaagcgccgctgcgccgctcccccgatcttgccgtactgcgaggcgatatcattgaggcccgcgaaccgcacatccaagccaagttcgcgcagcgcttcgaccagccaccagtcacagagccggtaggattcttcgatgcttacgccctgaacgaaatcgagcggcgcatacagagaataggtaatggtgttgcccggttcgataaacatcgctccgccgcccgtgcaacggcgtaccacgtcgaagccgagctgcttggcaatgtccagattcacctcgtcctgggccgattggaaacggccgatgaccacagccgggcccgcccactcccataatcggatggtcggctgtcgtgttcctgctgcgacttcacgcgccaaggtctcgtcaatggccatttgctcgtccggagtacgcggatggtcgtggatcacggtgagttgaggcttgagggcgttccagcgctcccggtattcagagcttttgtcgggctgcttggtttgtgcattgatggatgctgggatgttcggcgcatcggggctgcccacccccacccgctgcgctggagcccccgccagcgggggcaagttgctgcttacggctcggctgtatgcggttttgatggcaatttcatctgtgccgataatttggcaactagggtgagcgtccaatacggaccgcaatgaatcatcgctaattagagctcgttccaggtcatgcaacaaagcatgggattcggcatccgaaactgattcaataaagaaatcaccactgatatggcatgactgtgcggtgccgtcatcatcgacggatacggtcacggcgactagtttgctgccaacggttttgcattccccatgtcgcatttgcatgcaactcagtatagagagttttctggctcccctcagtgaggggagccaggtttgaggtcacatgcgggccagaatgtccttgccgacttggtcggtggagcgcacggtggagccgagctcctcgatgtccgcttcgacggcggtatggatcttcttggccgcatcatcaaagccgagatgctcgagcagcatggcggcggagaggatggcggcggtcgggttggccttgttctgaccggcgatgtccggagcggaaccgtgaatcggctcgaacatggacgggaactcgtcggaggcgttgatgcagccggaggcggagtagcccacgccgcccaccacggagccggcctcatcggtcagaatgtcgccaaagaggttgtcggtgagaatcacatcgaaacggctcgggtcggagaccaggaagatggtggccgcatcaatgtgctggtagtcgtgggtgacctcagggtattcctcgccgaccttgtcgacgatgcgctgccacatatcaccggcgttgacgagcacgttcttcttgtgcaccagggtgacgtgcttcttgcgcttcatagcgagcttgaaggcgtaacgcaccacacgctccacaccgtatgcggtgttgatggacacctcggtggccacctcctgcggggtgttgcggcgcaccgcgccgccggcaccgcagtacagaccttcggtgccttcacgtaccaccacgaagtcgatgtcgccggggttggcgagcggcgaggtgacgcccttgtacagcttggaggggcgcaggttcacgtactggtcgaggtcgaagcggagcttgagcagcaggccgcgttccagaatgccggccttgatgcgcggatcgcccacggcaccgagcagaatcgcgtcgttggccttgatgcgctcctcttcgtcctcgggcaggatcgcaccatcgcgcagatagcgctcggcacccaagtcgaagttctcgtactcgaagtcagctacgccttcagcggccttttccaaagccttctgagcccacggagtgacttccttgccaataccgtcgccgggaataacggcgattttatatgtctttgccatagttcaaggagcctactcgcgctatcacctgccggcccgaacccgctcagctagtggacatggcctaatgagcgagccccatcacatccatgcaccaagcgttctcataggaaacctcttcccattgcttgtaacgcccggatagaccgccgtgaccggcctcgacctcaatcttggccaccgcgtccacgccggcggactgcaaacgggccagccatttgagcggctcgacgtacagcacgcgggtgtcgttcatcgaggtggtaatgaagattctcgggaattgcgcggcggcgaccgcgccggtggcagccccatcagcactgccgtcaccggcagcctcgtcgttgccgccctcgagcacggcgaccggcacattctcgtatggcgtgtacgacttcatgtactgatacacctcagggtcatgcaacgggtctccccattcgtcccattcggtgacggtcaacggcaagtccgggtcaagaatggaggtcaacgcgtccacgaacggcacatccgcctcaacaccggcgtagcattcgggcgccatattggcaatcgcgcccatcagcaggccgccagcggatccgccgttggccacggtgcgccaagcatcagccaaatgcgccttctgcagcgcgcgtgtggcgtccacgaagtcctcaaaggaatgcttcttgttcagtctgcgcccctgttcataccaggcgcgtcccatttcgccgccaccacgaatatgcggcacggcgtacagcacaccgcgatccaacatgctcagacgagagaccgagaaccccggatcggaggaaatctcgtatgcaccatatccggtaatgaacatcggcgaatcctgcgccgggcaatcgcggtgccagacgagggaaacaggaatgcgttcgccgtcgcgcgcggtaatccacacacggcgttccatgtaatcgcgtggattgaagttgcccaacacggtggctcgcttcagcagcgcatcttcaccggtggcgggatcgatttcgtgcaactcgcccgggcgggtgtagctggcgaacgagtagcgcatgcgcggcgcctcatacgaggggttgccgccgacgccgatggtgtacaagcgccgggtctcaccgggcaggtggtcgtcgctagcaccatcggaagatgacgtgtgatccgtgggggcctcatcttcggtccacaagatttcgccatgatcgccggtgaagttttcgcgatcgtcggcaaccatgtcccagtcgtcctccagggcaggcggcagcaattccgtaaaccgccacggccgtccggccaggaagtcggcggcagccgcgctcttggtcatgtatgccacgtgcggctggccgtcggcacggtagctcagggacacaaagttgcgatgcaacgcgatgccttcgatgcccagaccgtgggcaccctgcaatatcgccggattgacgtcgttgaagtatgcctcggtaatcggcttatccggctcaccatgttcacagccgtacggcgacccggcggcaatgcacacgccttcgccgagtcggtacggcggctcatggccacgcatgtcaatgacgtcgatttcgaaattcggattggcagcgttgtgatagaccacggcgagtggcacatccgcaccgttctcccccgcgccttcaaaacaggcaaagctcacatcatattcaatatcgttctgacgcggaatgaaagcttggaattcgccttcaggcgtggccaccggcagcatcagcacttcggtggtggttttggaaccggtgccgatcacgatattgcgctcatcaaaactgatgccgacgcccacccagaaccgttcatcggtttctcggtacacgcacacatccgattcgaccgccgtgccaacacgatgccgccacacggcgagcggccgccaggaatcgtccaattccacccagaacacccattggccgtccggcgtgaagcatgcgctgccaatgccggtgaactgttcgggcagttcgctgaccggctccccggtctccagcccggcaaggtcgcgaatgcggaaatcatatcgttcgtctcccgcaacatccacgccgtacagcatccaacggccgtccttgctcagatccaagccgccgagccggaagaagtcatgtccctcggattccttgttcgcatcaaaaacgacctgttcaccgggcatggagccgggcgcgccttgcggatccacgaccggcgggtcccagtcatcggcatcgcgcacggggatgcggcattgcacgccatactgtttgccctgctgcgtgcgggtgaagtaccagtaatcattgacgcgcgtgggaaccgacatatcagtctcttccacatgcgatttcagctcttcaaacaacgtatgccggaaatccgccagatgcgccatgcgacgctcgcagtactggttttcggcagctacgtagctgcgcacatcatcggagtctttgtctcgcatccactcgtaatcgtcttcgaaaacgtcaccgtggaattcgcggcgcttcggctcgcgcttggcgtaaggcggcatcgcggccgcggcgtttgtgctctcgtcagtcataccacgcgattataggcgaggcaccgcaccgggacgcattcagtgttcatcacgccgcgcctatcgcaacaccgtcttcagatacggcagcatggtcttcagaatgttcgagccggtggtgccggtgaatactggcacatcggttaccggagtcggctgggtcgaggtgagccccgtcaccgacgccaatccggttgattcgcgcgggctcaactcacgaatgacgatcgccagtacacgtccgggatatctgcgggcgatggtggcgtacgtggtcgggtctttctgcccgtcatcgcccaccagaatgaacttcatgtctgggaagtcggccataagttgttcggcaaactcaagtttgtgctgggggccggtgggtacgaaggtcttgggcctcgggtcgaggtcgcgcagcagcagcgggccttcgggaaaaccatggtcagtgatgaagttgcgaatcgaactctccacattccagggcgatgtcgaaagatagaagaacggtgcgccggggaacaggtcggcgatgcgggtgaacagcacgctcatgcccggcacggaggctttcttcttggggttgaggaacagcaggttgtacgcggccttccatggcaccggggcctgcgtgatcatgatggtgtcgtccacatcggagatgatgccgactttggcactggcggggatggtgtacaggttggcgctcacgggtttgcggttggccacgctgtaggagacgcgatggatgccgggcaccagacgatgctcggccacgaggtcgagatatccggcggaatcggagatggcgtattcgctgccgagatcgcgcgtgcggtccaccttgtcatagacctcggagacgccgatctgcacggtgttgagcggcatgtcatcaatgctggcctgcacgtgggtgcgcggcgcgggtatggcaagcatgccgcggatgccgcggatcagttcgccggattgcgcgtgcctgggggcgtataccgtgcggcagatcagacgcgagtaatcgccggtaccataacccacatagggttccactcgcggataccagtcccattggcgcaccacctgagtggagatgcgtgaccatacaccgaacacgcgggtgacggcacgacgtatgaatcgggtgatcggcggcttgacttcgatgcgctcacgcttggagggggtgtcgaacgtcgtggcagccttgcgtgcgggaatcggcacggtgggcatgtcatcggaatgctcagcattgctggcattgtcgacgccattggcggatgccttgacgtcagagactggcgcggtggcggacagcgctgcattgcaagcagcagcatcccaaggcagtcgcttgcctgccgcctcaaaatcctcgcgtgggcttctcatagacaccaatataggccatacgcctcattttcttggctcccctcagagaggggagctcaaaaggaactaccgcacgaccttcgcgtattcgtcggcgctcagcagctccggctcatcgtcgtcaagctcgaccttcagcagccagccttcgccgtacggatcgccgttgaccacggacgggtcgtccgccacgtcacggttcacatacttgaccgtacccgccacgggactgatcagcggctggacggccttggaggattcaagctccacgatctcgtcgccggcctccacacgggcgccaggctcaggcagatccacgaacacaagttcgccaagctggtcggcggcgtattcggtgatgccgatgattgcggggtcgaccgaacggtccacccacgcatgctcctcggagtattcgaggtggtcgggaatgtcgagattcagcggctgttcgttttcgttgtcatcactcatagtcataagcctaacctatcttcgcggtccgtcacagctcgcgaccgagccattcctcaatcatgtagcgggcgatggtggcgcggcccggcgccaccatacggccggcgatgagctcggccgtgtattcgtcgcgtgtgacccatcgcgcggtcatggtctcctcgccatccacacgcacgtcggtggcgatcgcatgtgccttgaacgccatcatcagcgaagccgggaacggccacggctgcgagcccaggtaccgcacctcgccaagcttgatgccggtctcttccatggcctcgcggcggcaggcgtgttcaaggttctcccccgcctccacaaatccggcggacaccgaatacagcctcgaatccttccatgccgcgttgtgttgcagcagcagacgatcgtgcccgtccacgatggcggtgatgaccgccggctccacgcgcgggaacagcacacggttgccgtccgcctcgttggtgcatcgctgcgcccatccggcgagcgccggccggaccgccgcgccacaggtggggcagaaccgctggcggctgtgccagatgcttaaggtgatggcactggtggcttgcccagcctcgcgcgcgttggagtgaggggcgaatccgcgcaggtccacccagtcgaaccgggtcacggcctgttgcagcagcgtgggcttcggggccaagggctgtacgggcgcgccgaccgaatcatcgaaggcatcgtccgcaccttgcccggccgaatccggtacaccgagcggcccggcgattttggctgcggctacgccgccattacccttggcgtttcccggctgccgtattccggcggcagcacctccgctgatgccgttcttgcccagcgcgccgtccacagtgccggaatcctgggtgccgagcacgccgccgacggcaccgccaacaccggcaatcccgccaacaccgggaacaccggcttccggcacgcgcgtgatatccacggcgaccacggattcgccgcgcgccccgacataggagccaaggaacatggcgaccgcttcggggtagcgcgccagttcggcggacacataggcacccggcaacgtggcgagccgcattttcacgttctcatagtccacaagctcgccttggccgcgcggtacggcgacaagtccgccgcgcgtaagcacgactttggtggtcggctcggccaacagctcgtcgatcagaccgggttcgctgcgccggtccacctgatagtcgatgtcaccttgtgcgagcggcaggaacggcagcgcatgggtcagtgccagaggcgagaaatgaatgtcagcggtcatcgaagtctcctatgcgttcttctgcgcgctctgcacgcgcttgacgagcgagagcagtgctcgcgccacggtatccggatgttcgacggcactgaaatggccgcagtccggaatatctatgaattcagcgccggtgattcgttcggcgagcggacgcatcacactcggattgctggaggggtccagttcgccggataccaccaggctcggtgcgctgatcgtttccggcaccgcccccagttcaggacgtccgtaggtcatgcgctgacgccaggccagaccagccgggttctgttcgttgatccagccggtcatggtcgcgatgaattcaggagtcttcttgacggtggaatcgccatcggccggctgcgcgaagtgcatcaccggttcgaccgagttcgtctgttcggcggcgtccgccatcttcagtcggttctctccgcccacgccgtcggacgcggccatcgtgtcgcacaaggccagtccggccaccgtttcggggtacaggcgctggatgtccatcgccacgtagccgcccatcgacagcccgacccaaatcgcctgctcatagccggcggccttgatcaggtccacgtaggctccggccaggcgatccaacgcctcgctgtacgcgccgttcgccatgcgggggcccgaatcggcgtcgctcggcaccggggatgcgccggagccggccatgtccggagcccagatcgggaagtccggcacgtcgttcaggtcggcgaagtcggcgagcgccttcgcgcacacgtcccacatgcggtggtccaccgggtaggcgttcatcagcaccaccggcacgccttcgccgtcgcggtagatatgattggccaattcgattgccatgaattactccttcacattcgcgccccactggcggagctgtcggcacagtcggctgggagcggtctcaacgcggaccgccctccgtcgctacgcgccatcccctccaacggaaggcaaaacaactgtcagattccggcccaggccaacgcctgtcgcacgatgcgcccatggccgttgaccatctgcgccacgaacgtgtccattacgtcgctcttgggatccacccattccacatccagcgtctcgtcctgtggcttgcagtcgccggcgatgggcaccacgtagcacagtgcgatggcgtgctggcgcggatcgtagtattcgctcagtcccggcgtagggaagaattcggccacggtgaacggctggagcccgaccggcagcagcggcagggcgatatcgcccaaatccttggccacattgcgggcgatggcctcgcgcaacgtctcgtggtacagcacacggccggtgatcagcgtgcgttcgatcgacccgtcctcggatacgcgcagcagcgagcccacctgggagatgcggcccatctcatcggtgcgcacgggcactatctccacgtatgcgatgggcatttggtggcgggcccggttgatatcggccggtcccagccatcccggcgggttgccgtggcccgaaccgccgccgtgaatgaagtcctcgggcgtgatgttgtcgaattcgccgcggccacggccggcatcgtaatcgccctcgtcgggcacttcatcattcatgactggcatggtctcattatcgcgcgcattgatgagcatgggcacaattcaccgaaaaattgtctgtgaattctcaacaaagcgcctcatcgcctccatgcgcccgcaatccattcagcttggggcacaagcttttgccgaaatgttgggtggtgctgggaaactggtacacagcatcaagcactgtgtttgaggaaggaacttcaatggccgccaccgccatcacttcagctgagtttgagaagaccattactgacaacgaaatcgtgttcgttgacttctgggccacttggtgcggtccgtgccgcgcgttcggcccgattttcgaagctgcgtccaacgagccggagaatgcgaacatcgctttcgtcaaggtggacatcgacgccaatcaggatctggctcaggctgccggcattcaagctgtgcctacgctgatgattgccaagcagggcgaggtcatcttccagcaggccggcgcgctgcaggcctccgatctggacgacctcatcgcccaggccaaggcgctggatctggccgccgccaaagcacagcaggcagcgcaggagcagcagtaagccttatcacactgcggcaacggaagcgcgaaaagcccatatatagcgcttccttgcattgctaactactacatatgccatccgtggcgggtcgaacacccaccacggattttttattcatccactcaacgtcctatgatggagagcagtgtgtacccaaccaaggagcgcaatgtcgaagcacgctgagcgaacctcaatcgtcaaaaccctgtctcggggccagtgggcgaagatcgcggcggccgtggccgcagtgggtctcattgccactgcaggcgttatatctcgcgacttctatcagtcgagcaccgctacaccttccatcaccccaacctcattctccgccactgatggtgcggcttcccgttcggcatcccgcggcgcgctcaagagcaccacctacgtgaccgtcaaggtcaatggcaagtcccgcgtggtcctcggcgaaaaagccaacatgaccaccgtcaaggatgtgctggaaaccggcgatatcgtcctcgatccggaagacagcgtgactccgagcctggattccaaggtcagcgagtccacagtcatttccatcaaccgcgccaacaccacggtggagaccaccgacaccgaaatcaccttcaatgaagtgcgcaaggagacctcgagcctgcccaagggccaggagaaggtcgagaccgaaggcgagaagggcgtgatggagaccacgtctctggtaacccgctccggcgatcaggtcgtttcctccaacgtgttcacctcctgggtcaagaaggctccggtcgataaggtgattctggtgggcacctccaccgtgtcttcgcccagcgccgccagcctcggcaccaccacgccggccggcgagattcagtcctgggcgcatgactacctgatttccaacggctactccgaggccgacttcaccgccgccaacttcatcatcagccacgaatccggctggagccccaccgccacgaacccgtcttcaggtgcttatggcctgccgcaggcgctgccgggcagcaagatggcttccgcaggtgcagactggcagaccaactaccagacccagttcaagtggtttgtgaattattgcaacggccgctatggctcgatttccggcgcgtacgcgtattggcagaagcacaagagctactaagccagccaaatcaacacgtacacaacaggttccgcgccgcaagaaggctgagtgaaacccggcccaaacgccgagcgaactcatgcgcatgatgccggttcccaatcatcggggaccggcatcggcatttctgcgccttatcagccgaatcctcgcattatgcaacgccctagaggtcacttttaccgtgtcatacgaagtgccctccacaactgattatgcgaatccatgacggcatagcggcacaaagcacgcatatattgagctggtttgcaacagcaaatggtggaaatgcgcactactgttattcgcggttcctttaacaatttaggctagagcacaatcacttacggcttcggctcatcttccggtttcgtcccctgaccagccgccgggtcgcctgtcccctcatcgtctggttgctgttgctgttgctgctgcaacagctgctgctgccttaatcgtgcataataatcattcagagctttctgccgcgctgcttcttgctgagcctcaacagctgcgctgtagttggccatggacgtgtttactgcatccatggacgcagtcagcgtgttgacggcatcctgcatggcctttacgtcagtgccttgctgggacagcacggtattggcgttggcgatgtcgctttccagcgtcactcgcgttgaattatcgtcgacggcatacaggctgttgtccagcaaagtctgagcctcggcaatcttgccctgcaacgcctgctgagcgttagcctgatccttggcgttcttgctgtccgtcacggcctttgccgcggcagtaatcgcagtggcgttcttcttggcggtcttggtctggctagtggccgtcttggcatattccttgaggtccgacgtagaagctgaagtcttgcactccaccgcttccacattctttaccgcagcaattgccttcttcagcgtatctatggtcgcgccgtcagccacttgatcagctgtaatgctttgagcactcttggcgtcggccaacgccttggccagcgccttctgagcggtggaattctggtccacggcctcagtacatgccgtcaacgcatcctgatgcagccgatggctttcccgacgctgctcgctgaaacgccagtaccatacaccaccaatgatcgctgcaatcaccaccagcgcaacaatcaccgaaatgataatgcccttggtcctcttcttgccgcccttgccaccgcgaggagtctctgccacacggtcttcttccggctcctccaccggctcaggattctgttcgatggcactgaagtcgatgttcagatcgtctatggcactatcacgttgcggcttggcttcaggaaccggcgcaaaaagcggcagcgtcgcattattatcccgctgaggcgactgagcactttccgcagtatcaggtgccgcaaaagtcatcggggcagtagccacagcattggaagtggaaaaggcatcgccagcagtattcgccgcactcgcagtaggccattccaatacttcgtcaaagctggggaagacggactgaacgccacccgcaacagtccccgtaccattgtcaccctgcgcaataccgccgtcgttctcgtcgaacgagataggcggtatatcccagaaggtatcgacgatgtcaccgcgagccggcgacgtagagggaccagattccgcgttcggttcagggcgttcgtctgttcccatgctcttctcattcctttgcatcattgaagtcattccaaactgtcagtttatccagccctatgccgagcgtgccagctggtattcaagaatgtcacaattctttactattcgatatacagccagcaccataaatccaacaactcagtcttataacagtaaaccgtgcggcacagaagtaccgcacggttcatattgcaagacgatcggcaaacgccaaactattacttgcgggctttcttctcgcccttgctcttggcacccttatgagagctgcgcttgttgccgtcctcgtaatagtagtagtaatagttcttcgagtgtatcttcttcggatcagcgaagttgaagatgaagccgagaatcggcacttcagcggcctgcagagccgtagcggtgttctccagctccttcttctccactacgcccttaccagtcacgagcaccagaccgccagccatacgtccgaacacggtggcgtcgttggccacggacagcggagcagtatcgataatcacgtaatcgtactgggtgagggcctgctcgaccatttccttcatcaggtcggagttcagcagaatgctggcattagccgggcgcttgccggcaggcatgatgtgcaggttcggcttccaatacttctgaatgacatcggccggggacgcctggcgagacagcacgtgagacaggcccacgtggccttcgatgccgagtttgtgggccacggacgggtggcgtagatcggcgtcgataagcagcacgctcttgccttcctcggcgagagccacggcaacgttggaggaaaccgtggtcttaccttcggacggatcagtggaggtgatgaccagcagtcggccatgaccctgcgtggcggtggtggtaaggaacgacaggttcgtgcggatgcggcggaattcctcagcctcgctaccagctggctgagcgactacgaccgggcggctgtcgtcaagaatcgaagcctgaggcacggtacccagcgaagaagcgtgggtcagctcatgcacatcatcggtggagtccaccttggtgttgaggatgtccttcagcagggcaacgccaatgcctacgatgaggccgagaatcaggcccgcggccagatacagcggaatgttcggggagctctgcccggtaggagtctgagccttctgcactaccgtgagcttgatgggagagccgctggaagaggagttgttgtacaggtcggaagaaatctgatcggccaggttcttcgccacgctgttggcgatgtcggccgcttgctgcggatcgccgacttccgccgagatgtccaccatgaacgtgttcggggggttcgtagcggtcaccacatcggcaagatcggtcgtggtcatatccaggccaaggtccttaatgacgggctggagcacggcttcggtcttcaccagttccggatacgtcgtgatctgggtattcaaataattggcacccgagctcatatcgttggtagtctgcgtctcgccggactgaccggcatacgtggcgaacacttcagccgtagccgtgtacttcgggggcatgatgaacgtgacagctgcaaccgcagcaaacaccacaacaaacgagataatcgcagacgcgagatgcttgcgaacaatctgcagcaaatcagcgatggtcaatgttcttccttacctcttcgggaaattctcacagatggtctataatttagcacctaccggggaacttctcgagcttttgtatccttgtgaacaatgaccaaaacccttgatacgactgcagaataactgtacacaatcgcaatcacaatgtattgtaggcctttcgctgtttggtgtgggtgggtctgtcaggtggtgacggtgctgaggtcgagtttgccgcaggtcaggtagatcatggtgctgaagtagcccatgttcttgaatccgcgggctcgggtcttgacgttctggatgacgctgttgagtccttcgaggatcgcgttggtgtaggggtggtcgaagtaggcgaggatgtcccgccagtggcggcgtatctggcgggcgaactctttcatgggttcgagtcgggagcgcgtcatccacgagcacagacgcttgagggccgtctcggcctcggctcgatcggcgctggtgtcgtagatgtcctggagggtctcgcgcatctgacaggcgcgtccggttttcaatcgtcgccgttgcaggctgcgcttggtttccaattgcaggccggtcaggttcgattcgttcctcaaccacaggtacttggtccgcttgagcagcgcgttgccgcgggcctcctgtttgcggaccttgtcgacggcctcgttggcgtgtttgatcacgtggaacttgtcgatgattctcgccgcgttgggcagccgctcgcggatgcccttggcgaaccccaggctcatgtcgcaggtaaccagacgcacccggtcgggatcgccgttgtgatccatgaaatcccgcgcgaaccgtttgatcgtggtcgagtccttgcccgggaccacgcagattacgttgcgctccaccaggtcggcgaccacggtgatgtaccggtggcccttccggctggtctcgtcgatgcctatggcctccacgcccgtgtagtcctcgtaaagcctcgcctcgtccacgtaatggcggatgaaccgccacaggcgggtgtcatgttcgccgacctgctcggcgatgtccgcgaccggctggcttttggccagctccacgaccatcgcctcgaacaggagcgtgaacccgcttcccggcctcgcccacggcaccgggaccgcgtgcacgccgtgggcggggcacgtcacgcgcggcacgcccgcgtgaatgaacgccttgtactggaagaagttcagatgccgccacacgcgctccctcgcgtcatgcaccggacacgcggcctcgccgcaccccggttccgggcaggggaaccgcgaacccgccgcgaacccgatcgcgatatgcagttcccgtctgccgtcctcctcgtcacggaactccacgcccgacaccctccacgggtcaggcagttgcagggcggcggtgaacaacgacgtggtatccatacccccaaactacccgaccagcaccaccacccccccgacccactcacccacaccaaacagcgaaaggccgtattgtaattcaaattatcattcattacaatcaaaattgtcaataatacttatgcagtgtgaaggagtatattatggcatccttgcttcaaggattcgaagaagttcagctagttaagcccgttggcaaaacggtaatgaccgttaccgattccgttgtacgttttaataaggccaccgcaaaagtgctgaattttccagcacaagttaaaatccttattaacgataaaaccagacaaattgccgtcacgccgactaccgctaaggcggataatgccgtgaaattcagcaagggcgagggcaagcagactacgtctgtaagtatcaagaatgctgtgcttgttgaagcaatttccaagtacttcacgcttgtcgaagctccagaaggcgaggtctctttcgcctccgtcaacggcactgcttacccggaagacaagaccgtgatttttgatgtcgcaaacgccactgccggcaccatgaagcgccgcggccgcaagaagactgagtgatttctgcttaattcgcgattatacgaatactgtaaaagcctggatttcgaattaatgataattcaggcttttaatttccccaaaaaccagcatggcttgggttgaacaatacatgcaccagccccacggagaggatctaaacggctgattggcccatagattattcagtttttgcaagcgactgccaattacttggtgggagtttaaaagtacttcatgaaagtgaacggttgaccgaacccccatcacctcacccacacatgcaactggtacagttctcacggaggatatgggagggaaccaagtgtccacaccgaacaatacgcagctcggcaacaagtcagttcaagaaaaacgcagaaactccggtcattgccccgcgctacagcgtggggcaatgaccgagacgctgactcgtatcaccatcaccccatcagacatgttgatgtttgccgcagtggccatgctgccatttgatggcacaaaaattggcattccgctcccctattggacgccgatctccccctggttgttcaccctgtacacaatcatcaactggcgatacttgcgcgataccgcacgccgcttcctgccgttcttcctctttcccctgctactagtgctcacatccgtatacggctggcagtcatatggaatacacgccagcgcaaccgcaaagtcattcatctccatattgttagggctggcgtgcttggcttcgctcgacatcgcgatccgcattaaacgtgtacctgtacgaacattgttaactacgctattcaccgcatatgtagtggcattcctcattgggatactgcaatatatcgctttagaacgacgtctgaactggcagccagtacgagcatatttttggggtgctctgtatagaaactatgcgagcgttcgtcctcaattcatgttcgcagaacctagctatatcggcatgcatctgttcggcgtactcctgccagttttctggctgacccgcgaccgcaagattggcatattgataccgatatttgccgctggagcaattgcgatgggctccggcacccgaatcatactggacacagtggtagctacatttatctggttgatagcgacaatcaacttccactcacgtaaggcaacagctgggttcgtcggtgctttaggacttcttggagcaggtggattgagcgcaattatcatcaatccgcgtctaaactctttagccaccaatggattacttgctggtgacggatcgatgagtgcaagaatcttccatatgctcgctcccatgtggtcatggaaacatgatctatctcacttcatgtttggatggggcgcaggcaatatctctaatgcagtgcgtactggttacgccggtgcccgccaatggtatgacgcccatggcggtgcgcccagtaccgaaatcgacggtttagcaaatcccccagcggatactttcacaatgagcatctatgccagcttcattaccgaatttggcctattttgctttttggccttcttgcttttggtattagcacacgtagcggtccatcatggatggagccgacggaacatatgctggttcattcttcttgcatacctatatattcagtttgaatcatacgcattctatgcaattccactgttcatatgggctgtctgcacaataatgaatcgaggaaaaaacaacatcaattccctttagattgcgagaatcacaattcgctactctctatcatgccgataaagagtgcgcatacgcccgttgtctaattgaaagtgcagcacccgttagattggagattgtccggatagccaaacggaggggtgttgcgccttgggccaggtgtattcgcacctgtcggaagaggaacggcatgatccgccgctacctgcccaaacgcacgcccatcgccccctccatggcacgcgaaccgcaggagatcgtcgacgaaaccgacaacaggcccatgcgagtactcggctagcgcacccccgccgaggcattcgccgacgaactgctagaatcagccgagaacaaggataacgtccggattcttgcgtactttcggatttcggccttgaaggaaaggggcatggaccgtgccgtgcacgatgcaggcgagaatggtagttgcgatggttccactgagacggctgcgccattccccgttaccagccgagtcacgaacactgacaacgggaagaacgcataatccgcttcagttcagttgaactacccatatacgcttctatcctctcgctgaaaacagcgccaccagcacccccgtcgtccaattttatttccgcccagacgtcaatccccactgccgataacgccaacagcacatcaacaatattttgtctcgtcattccgactcgagggattgccaattatctggaggaagatctagtttgagatattcatacgaattcgttttgatttcagaaagaacgcctttggcgttgcgaatccagttgttacccttattgtctcgaaagacaataaccgattcaacacgaacatgcattccttcgcccggataaggaacataagtcgtaaatctcccaggagggacggtacctacacaaacagtattatttgtcccgctcaaataatcggcaccagccccttgatatgttccagaagttaaaacgacatcatagatcggctgatccgaaccattattgacggaaaccttcattaatgaagaattctccaccatctgaacgccgcctttcgaatcatgtaccacccaagacgatatctcattcgcttgttcaaatttggcaatctgctggtcatgattcttcacatagtcatatgacataaaagcaataacgatggaaatcacggaaatgccaaccgtgaatatgtctgaaacattggtaagccccggatgttcagtattcaaaaaagttccaatggctttaatcattccaccaaccttttgccgaatatagttcatacattaatctcttccccgccgagacaatatccccattctccgactcacacctatctaatcctcaacggcagcatatcacacactcaaacatctgttcgattgatatggcctgatttttgttccgcccttatagtggggcggcttgcgccgcttggtttgcataatactcggtttcggtccgttccggtgtcctgtagcccaaggactggtgcagacgcttcgagtccccgccacgagacccaccggaacgtcgccaattccaggtccctcaaatcctggaagggcttgcgtcgccagacgagctcggtcttgtacgcgccgtcggcgctctcggccatggcgttgtcgcacaagtcgccgaccgtgccggtcgagggaagcatgccgaattccccgaccctggtggtgtacacgaggctgatgcactgcgcgccatggtcggaatggtgcacgagaccgtccgcgccgccatgcgaggcggcccatgatatcgcctgttccagcgcctgcagcggcagctccctggtgtccatggtggtggcgcacgcccatccgacgatcctgcgggcgaacacgtcggtgacgaacgccgtgtagccgaacgagccgttgaccatgcgcacgtaggtgatgtcggccacgtgcagccggttcggcgcctccgcctcgaacccgcgttccacgaggtcgggcctgccgcccgtgcccttcgccggtttggtggcgacgggcgtcctgccgcggcgcacgccgcggattcccgattcccgcatgacgttcatcacctggtcgcggccgatctcggccggatcccagccctgggcgatcaactgggccgcatcttcctgtacccgtacacggccatgaagaaatccgagtggaccagaaggatgccgcgggccggcgcttcgtgcctggcggccatgcggctgacaggcctggatttgaacatgcggtagccgtgaggcgtgacgagcccgcgatccggcgatccggcgaggactcggcatatcggcccgatcccgaaacgaccttcgtattcgccgacgtacgcgaccatcaacgccgtgtcgggtcgagccgtgccgcgaaaaaagccgacgccgtcgtcaatatctcgttcgcccgcctcaatcgcgcgacctcggcccgcaaactcttcaactccgccatcgcgtcttcggccgactgcctggtctccgccgcgaccgtggcgtccgcctcgttgcgccaacggcgcagcgtctccggcgcgacccccagatccctggcgacctgtttgatcgtcctggtccccgacggatacgagccgcgcgactcggtcaacagcctgacggccttcgccttgaactccggcgtgtatctcgctccttttgccatggttccatcatctcccatcgagttaggggaaatgcggaacaaaaatcagttcatatcactggtctgggataaagcaacggaatggattggacaagccatgcataggcaaagcagtgtaggcataacccttaagcaaatgatgatggagcgcacccattcctatggttttggaattgcctcttaatagggttggtaatttcagtcaaacataagataatctattcgtggggttgtcggatggctgtagcatatatgcgggatctggcgtaaaaaccgagcaaccaaatcgttgattgaggaatgagatggctaagaacaagctcagcatctatttaattaagcaagacgttccgccggaaaagattaccgtcgaaccggatgaagacaagggaataatgacgttgccggtcgaaggtcatgatgactataggctgctggtaagaacgcgaggggagcataaacctacttgggttgagtctttctttggctcatcagtagacggagagtgtctgagtgtggaaaatgttagcctcgtactcgtcataccggttttgctcgagtgcaatgagattggtgatgaggaattcgatgatggctcttcgaatggcatggaacagaatgtgcgatattttgccctaacattcggttacggacgcgcactgatcaatcgatcttctgtcgaggaacgttttgggctgaaatgcattcttaacactgtagagcctaatacactgagggcggtcaggtttgccgacgtttcaggcagtgcgaaacggtccagcgaacagctgcccaaagcgggcggaattgacgattttgctttcgatgcggattgtaatttgctggggcaggttaccgccaaaggtgaggatggcagctttttgagtgggatgatgacgggaagggactctctgtccgttacgaaggaagtcaatcttgaaaacgcggaggcctttcttcgcgagctatataaggtgtatcggaaggacacctataagcaattatttgattggattgaccgtattgcaagcgtaaaggacactgaactcattaatgccttgtggaacgaggcgcttcatcaaatttctcatttttctgagtatgctgacaccaataataatttatggatggcagtgcctgatgtcataaattgggatgatattgagggattccagattgggaatgagaaagatcctcatggagagccgcgccttcataatgatattttgcttggtgacgtcatccgttcgtttaagaagatgccagattcgctagagaagttgaagagtaaaaagataaaggcgatttcaagaattgacggctgtatcttgcgaacctggtcgtcgagtgaatgtcttatgggtgaactgaactataacgataaagcgtactgcatatgtgatggcaaatggtatgagattcagcgggaatacctcgagcgaatcaatgaggatattgaaagtattgaagaggccaagacttctttcattccgttcaaagaagattaccgcaattccagcgactataaagaacgagatggcaaagaaatcaatctcgagaatgaaggaagatataattacgagcttacaagacaacttaacaaagatgataaccatttcatactaatggatcgtcagttaatttcctatggcggcggggcgagccgtatcgagttttgtgatgttctttctgattccggtcagcgtattcacgtgaagcaatattccggctcttcggtaatgagtcatttgtttaatcaaggtcttgtgtcggcaagtattgaaaaagacggcactgattttgctgagaaagttgatggcaaaatccaaaaggttggtgaacaggggcatctagcacaggacgaaatagatggtttccttctggagaacaatccagttcgcgaagtcgtttttggtgtcattcagaagaaagacaatcgcaacctcccatttttcagtaaagttgctctctcatcggtaaagaagcagctgaaacgtatgggcatcgaaacgaagttcaactggattgcgagggagtgaggagtgcgttggcatcttggtctatagtgtggttcggccattcttttcacgaacctttcatacaggtaaggaaagcaaagctgctgataaacggcgtgacgcatcgcatcatccataggctgggcacgttccggctcttggtttccgactgtggtttcgttttcgcgaataaaacgtacacaggacacgggccacgcctttcatgacaggaccgaaaacctaagatcagcaagggttcgaacgttatcaaaaccgtttcctttcccacactttaaattaaagcttagaagatataatagtcatcggattgatcgacgttgattgaatcaactcgtagacatgaaattaaccagttcttcggaagggattatcaataatggtagtcgtacaagaagcattcgatgtcccgacagatattatggctaaattggcaacaggagaataccgcagaatcggcggagtcgtcagatatgcatccggagtccgtaatgggcaaatcgtaaagcttctaaaacccgttgattcaaaaacaaccaaacaggtacaaagcgttggtgcccaaatcatgaattatgcgaaacgtaacaaaccagttttgtatgttggcggtgcgattttaggtgtgataacagttggtggaatcgtctactacaaggtcaaaaaccacgaatcagctgctgtggtgaaatttaaaaatgcactgcaagcatacctcgatgagattcatgtcgggaatctggatatccaaactatagaaaatcttataactgcactagatgatttaaagtctcataaagattatgatacatataaaatcggaatttcagtagaagatatggatcttcttatagagaagatccatgattacacaatcaatttagccaacaataaccaaattgctctcaccgagcaagaatgccatagaacagacgatttcatcacgaatctgcagaattattcaaaaatacagaaacgtatatttgaaaaggttgcataacgttaacgtcgacaccagggtcgcgatttttacagtgctcagcgagatggtagggttttgtgatctcacctaatttgagtccacggaacatcgatgttcttaggcaaagtcttcttagaaactgccgtacgggaacatcttgacacgacctgccgtgttcatttttccgtatgtgctggcacggtgtgtactggcatgggtttggttcgttccgtggatttgttccagaccagttcgaaccagcgtccgcggttgcggtcgacggtcatggcgaacaggccctggcgtacaaggtccaacgccagacagcaggcgaaaatggccaatacgcataccgtcatggccgcgagcggatgcgccgacaggtacagtttttcgagcggaagccagttcatccaaagagtcttgaccgccggatgatagtgaaccaggtaaacaccgaaagcggacccggccagacaattaacgcaacgactatggaattccctgcgcgcgaacagttcgaaaagcccgaatccgataaacatggacggaatcttccaattatcgaaaatgaagaactggaaacccgcgccctttccggtcatggcgaagacaagcgaaaaagccaggcagtacacaacctcgatacccaagccggcgagaataagcttccaacaggtcgcggcgcttattcgctccatgtaccagcggtagtacgaaagcagaacaaaccagtacacgaacacaagcacggaacccccgtgcagatcgttgcgggtaaacggcaacaggcccgcgatgccccacatgagcagggcgattagggcgagactgcgatgcgcgcgctcgcccaacgccttcatgccggtcacgaggaacgggaggagaagcaggaacatggcgtagctggtcggataccaccacagcgatgtcgtcaacggcaacacgctgtgcgccgcgagtttcagcacgctccccgaatacaatcccgccttgcggaggaacagggtcgcggcgaataaggcgagactccagaaaagcagttcgcgttcgagaatccaaatacgtttgagactgcttttgagggtgttctggcggtccagcaggaaccagatggagatggtgaagaagatgaagttcccgacccatccgcctcccatgaggaactggtaggcgaccttcgtgggggttggcggctgggcgaggaaccaatcgtatctgttgcccacgcataaatgaaagctgacgatcatcagcatcgatagcagacgaagaagctcgatactggaattacgctttcccccccccccccattttgaatccgtcggctgggccgtccggtcttatgagaagccatgtcctttaatatcataattgtttccctttcgtctctccgcctctttccgacattcccctcaaaaggggtcgtgcccgaaagtatgtgcaaatgtgatctcgcccgtccatggcgcggtaatcagttcactccaacaaccagctcatgacaggataagattcaacttacccttaaatttggaaaaccaccattgcagaccggcagcgactgtagaaagataggtagacttaatttttttcatcacatacataggccaataccaattgttatatgcaagctgtggaagcatttgtcccaataccaagccccaagttcccaatttgaagtaggcgcaaagaatacagctcaaaaccaatcccgccaacgttgagatgagatatgccttaaagtaggggatttcattcatgttaacaatgacattgcagaaaagtgaatgctgattcagcaagaacatatatatagacaaacctaaatagagaactggatcacagataaaatcggatttaaaaaagaccagaaatggaagaaatatcgtaacgaatgcagtgcccaatgcaaacatcgctatatagcaagacaaccctcgagcaataatcgaacgttgcacagtaagatcccccttgacataagcagactggaatgagggaaaaaacgaacgcatgtaggcacttgagacattatatataccgctagtaagctgaatcataactgagtatgtcccagcttctgaaagtccgagaaaagcggaacacaatagggtcattgcctgtgtagcaccgtaccatgcaacagacacaagaccatcacgagacgcaacaaaggaaactgttctcaaagtttctttcacttcatcttttgatatttttttgatgtctgacgaaatgccatgtttaatatcaatatgtttattgaaggctcttgaggcaaacaaacgcaacaataggccatacataaaatatccaatagccgcagcaagaatttgtagacctgcaatgagaagaatagcagtaattaagaactgacctaaccgagcaatcgtcttcgatctattctctcctgcaacatcaccaataccacgcaaaaaagtcaagcaataaagaaaatagagattagtaaaaattgaagctacaaagataatccaagaaagaaaagagtgttcgatcgagaaatcatttgtaacagatgctatataaacagttccaaatgtagctgataggaaaagcccaagaacaccgattactgaataaataatccttgatgtcttaagtactacattgaacaaatgccagtcggtttctcttgaacctctgtcagaagcaaggccagttttaaccagtgcatgctttccacttaatgtatataaaatattacgagaaagtgttgaagtaaaaccaaactcaagaagttgagcaaagccagctatggccacaaaaacgtaccacaaaccaatctgctcgctggacaagaaaataagtaataatggaataaaaataaaattacttgatatagaaacaatagttcctatatagttccatattacatctttttttgttgtatttattttatattcgaccataaaacacctctactataatttagatacaagaagtagaactctaacgaaaatcaattactattatgattattataaaaaaagcataatttttttgcaatttcattaatgtcaaatccagcatcacgcacttgctcaatacgatctgatcgatgcccaatggattcccgatatgccctaagcgattcatctgcccatttttccgcatcagcagacaaggaaataaactcagcaagatcagtacatgcagctagagatggaacttcatctgacatcaacgtaggtagaccacatgcttgagcctccacagcagccatgcctaatccctcatatagagaagggaatagaaaaacatcaaacgccttaagataatccggaacattaggaaccgaaccagcgaaatggacatgctgtgaaattccaaggtctttcgccttccgctccagcgtagttcgcaaatcacctttaccgacaataattaatatggaagaaggttcacgacgcaggatagccgcaaagacatcaagtagaaatgtatgattcttctgagaaagcaagcgaccaacagtaccgaatacaggaccatctacatccagagatagtttcttacgcgcggtattatgttcgatttcattaacacaataccgagcaagatcaataccattgtagaatatttcacaattacaagacgaagcaatttttttaccaaatgcgaattcggcagcttgcttggaacatgcataaaaatggtcaggataacgtcgaactatatgatgacaaatctgaagcatctgtcgtttgagtcttccaccgtgatcgttagtattatgtgagtgcgcaataagatatcgtccacttttctttgcctcacgcatatacaccaaagaagccgagtctagattatgcgcatggatgacagtatactcaggatgattccggaaaaaatcctcaatatatgtttgatagtcatgcggattctgactgaaactaggtgccttataaatctgaccgcccatcgaaagtatctcagactcatattcgtatgaataatcttggtcgtaaggatgggttaggaaatcgaattgaatagattcacgatttactttacgataaatattcatcagcagtgtttccacaccgcctctgtccatgatatttacaacttgcagaactcgttgcatcttacgccttcccatccgaaagagtgtaaacagctgggtcactattaagccattcaatcagattaaatccatgatggaatcgatccgtatcattgagaatctcatcatcggaaggacttgggaacggaatgccgcattgtacatcttccattggatgagtaataaaacatagtttattggggaaatctaaggcatcaaaagcacgaatatcttgatcagaacattcattcatctggctaaatttaataaacaaattattccaattaattctagcacacctacgtttccattttttcgctgcttcttcgggagttggatagtgcaaaaaaacaatttcgatatcatcaagttttgcaactactttatctgactcatttcgacgagataacacatctgcatgagcagaaccgaccgcaggaacaaattccagttctgaattgacataatgttgtaaatttgaaacaaactttatatagtcagaggcaaaaaaatataatccagcagtcggtgataaatatggaaggccaaaatatctatatactgacccagcccaacaattattagatataacagtaaaatcagcacgattaagtttcatccgtcttacagaggcgaaccaaggatttgtatattcacgtaatttacgttctgcaactccccaataatctgttttcattttccccattcctccataatactctcagatattattaacgaaaaaaatataagttttttttagctatttgttgttatttggtaatttactatatagactaaagaaaggttcagccaaagcaacaagacagaaattcacgcaaacccaaaatgccccagattcactaaaggcaacaaaagcaaatattatcagcccaaacaactctggagttaactcaccgtacactatcaggcctctcagtagaacatattcataagcaaggaataaaagagcggcaactacaataccggattccagaacaacgtgcgcgaaagcattatcacaaataaatgtgtcataatatccacgataattttcttgcatcttggaaaaatcaaaaccaaacatatggaccccatatgtttcaaagtaatgatgcattaaatcaagacgtccagtcatcatagaattcaagttgctcatccaagaaatcgacggtttgaaataaaccataagccatatagaaaatagacttaaacccagaaaagccaacgaacctaagacaaggattaatttatcccaacggccatgcttgtcaatagtaacgaacaacgacaagaatacaatcagtaagattgaaatggctgaagttcgcgaataagctaattcatagcatgcataaaatgcaacaccataaattaataaatccttccatccgaatttgcgatattgtaaaacagcataagcgcaacaagccgttacaacagctaaaccgaatagattaggatgagtaaagccaaaagcttgccgctccggcattccattccccgcaataaatgttgttttttttataattccattattcgcgcaaataactgtcaaaaaaataaccgcaacattggtacaaagaacacaaatggcgattttacgtaaatcaacttcacgaccagcaataagaaataacaataggagaagaatattccaacttcctgatataaaagttgatgctagcacgcaacttcccaccacaagacagagagcatactgcttagcctgaaacctctgcacaagaattctgaccccgagcactaatgtgctcactatgcgaatcaaaaggtacagtaggccaatgttcatccatgacagttcttgaaaagatgtaaatttcaaaagattcaatgcacagtaaatagtaaacaaaacataataaatcggcataaaacgaaggggtcggctgaacgcatgcctcaccggtagccgtttcttgtttcgggattcactaattacaccttgatgaatataatttgaccgtgtgctcataggacgtcatttactttccatcaatcgttcatagtgctgcatgagaagctcagcattggcttttgcggaatatcctcgttgctctagcaatgctggattgtctgtcagccttcctctattgaaagtgttttccaaggttttagtccatttatcaatatcagcatcaagagaaaggaaagtacctgtacctgtgatatcagtctcccttggtacattatatgagtacatgcatggcaaacctgccgcttgcgcttctacggcagaaaccggcaaaccctcatataacgatggcataaagaaaacatccatcaccgaataaagtttattgatgtcctcacggacaccggctagtatcaccacatttgaaagatgctcggatgtgattattccctcaagctcttctcgatcatcaccatcaccgagaatcagcatcttagcgtcaggaaaagcttcatgaaacttggcaaatacatgaacggcaaaaggataattcttttgcttaacgagcctgcccacacagcccacaactggatctgtttctttgattcctaattcagaacgaagcagcttccttgattctgaatcataggcgaattgttctagtggaatgccgttattaatcacagtaaatggtcgcgagccgaacaggaatcgaccggcatcatcagaacaggcaatacagtcagtggcataatgcttgccgatagcattaagcggagcattacgtagccgatgcaaaaacttgtcagaagagctgttcaaatgactatgcaacacacgatgctctataccgaccagttcagcttctcgaaggacacagaacgcagagttcggcatatggcaatgtacaatgtcataattagaaccaattttttcgaacacctcatgtacctcatgcatgaaacgtctaagatcatcgccagcataattcacagggtaaacagaacatccccgtacttttagttcttcgtcataacgtttcttatgcatgtatacgccatctcgaatagcgtgatgcataaaatcatagtgcacacgtttttcatcatgatagcgttccatgttatatacaaaccgagacaccccggctgcacggctcaaagatggcactacttgcagtacccttaattgcttagcggacatattacaaactttctatcaagactccatggataagaacctagctaaactacttaatatcgcaccttatcctaagtgattaccgccatttacatgaataacctcgccactaatacagcgtgaagcgttactcatcaagaagcacgcgacttcggcaacctcttctggtaaaaaaactcgccctgcatgggattcgttggcataattaccatcagagacatctgcatagtttttggtcatcgccgttgcagtaacaccaggagcaatggcattgacccgaatcccttttgcatacaattttcgggaaagcccccccaccaaacaattgactgcagattttgtcaagccataagggatatcaacagcatgatctgcagtctctgaggaaataaacagtaaatctccttgccttttatgctcctccaaatgctcaaggaatgtctgggcaagaaaataagcaccgcgaaaattcgtattgaattgggcatcaaatttgtcaggagttacatgtcggaagtcaccttcatgcaatgaaaggcccgcattgcaaaccaagccgtcgaagcctcccaagattgattccgcccgtacaacaaaatcacaatcattttcgacctttgacacatcaaaaaccaaatattgggcattcccaccaagtgaagacaccgctttttctaatttttccttattccgacctgcgataagaacactggcaccttgggaaacgaatttccttgccatagccagaccaattccgctcccacctccagtaataacaatgtgacgtccagcaagcatgccagagggactaactgctcctacggttatgtgaacaggcgcttgacctgcagcgagcacaaaacgcgcagctttctttagtgcgttattaagattcatgtcttgtaccttcttcgttggtttatttaagcttgacgcctaaagaaccagcaattttgagagcagtctccttgccaatcgtgttcttaacgaattctttgcccttacgcttgacttcagaaataaaatcacgcgggcgactcaaatcatagaaatcataaatcgcctgtgcatccgtactcatctcagtaaagacttcaaataatatcggtccttcaacacttgaatccataaattgatcgactgcagcatcatatgatttcttatctgaagcagtcagatatgtaaacccacaggactttgcccaaccttctgccttagcgttatgccgcgcagtggtatgcaaatcgctagctttgttgcgccacataccattgtaataaaattcctcaccgccatggttattcagcaaaagaatgcgtacattcttgccgatatgacgagaacgtaatgcattcatgccgtagaagaaggacaaatctccgatgaccaagaaacttggtgtatcagaatctgcgacagcttgaccaaggaatgagggaaggcaaccgtcaataccatgagttccaatgttggcatataccttcacatgtggttgaagcttaaagaaattagtaatacggatagcattgtttatactcaagtgcaacaatgattctgaaggaatacgcgtaacaacgttcttgatggcataaatattagaccatccgaagtcaggatattttacagaatcagcataatcaacaagctcattatgatatttcatatcattggctataccgttttcgacatgttcattaaaatacttaaagaagtactcaggggtacaggcaaaaatagtggtcaggctcttgaacaaatcgcagacctcgccatcttcttgaaccagccaatgctcatatttgccgtgataacgcaatagcatggccttcagcccagaaaataccataccaccgaacgaaatcacaatatcaggcaacagctcttcgaacttcttgtcactcacgtaacgagtatccatgcagacagaaggattaaatgtaccttcacattcgatattcgacatgtagtccacagcaatcgcactgttgaacttatggaagaactcagtcatctgccgctgttgctcatcagaaacatagctttcctgaccacataccacgagaatacgcttagcagctgcaagctgattcaccttttcctgccattcatcttgagaagagttccaatccactcggtgaatggcctgcacctccggtaacgaatgcaacggaaaagtcgtgctgtagtatttcattggaacattgatatgcactggcccagtaccattatgattaagttccaacaaagcttcgttaaccaaacgacggcagtagatgtaatcatcatcatcacgaacaattggaagattcactgacttgcgaacatgccgatcgaacatgccaacttggtcaatcatctgatcttcccattgtcccaacatttcataatcacgatcaccagtcagcacaattaacggtacatgctgataatatgcctcagccacaggaggccaataattacatgttgccgtagaagaagtacaggaaataaccactggctcatgaatgcgttgtgaaagacctagagcaaaatatcccgcgctacgttcatcagtaatggaataacacttgaaaaaagggtcctcttcgattgaatggacaaaaggcacattcctcgagccggcggaaagaacgcaatgacgaataccacgttccttgagcaactggataataatttgatatggtttaatctcggtgtacatgcttttacccctcaatgcttattggattactcattgatagctttgaccaaaaatgccttggtttcagtccgttttgtctccaacacctgtgctacatgcgcatggtcaattggctgattagcgatgtcaagatcgcgccaatcatcaagataatgccgtgtctctccagtcataccaagcaaattcataatgcgtccagaaaaacgtccaggactgattgcaacaaatttgcgtccaagattcatagagaacgcagtgccatggaacgaatcagtaatcacatactcagcgttcatgaacaaactgacgaatcctccaacgggcgggcaaacaatggtatgttcacctttacgcttttcatgaaccccataagcaattcgataaaccggtaatccaactttgcttgcaaatcgctgtacatattggtcgaattcatggtttttattgagctggtataccaaaatataagacccagtaggtaaaacactatcatcacgcagcacgctccaatcatcacgattgagcatcaatgtagggtcaatgacaggtaccgcaccatgtacacctatagagtccaacaattcagcagcttcgacctcacgcaccgaaatatgagaatacttcttcaatgcatcacgcattaaaggcttttcccaatcctccaacgaagatttgcctatgctagccgcataagcaatgcgttttgctccttcaggagcaaaggacaaataaaaagccttgttaaagccttcattccatgtactattccacacctgatcggaaccagtgcagtaaatatctgcctgaggaggattttgttccaatgcttctactgaataatatttacggttcgtaagggcaagactggactgacgaaaatcattcaatggcttagcgcgacgagctacaatccgactaactggaatacgagccagtgatttaacaccaggaattctgaaaatcggcatcttcttagccaattggccattaagggctcgttcggtttcattttccggaatggcatcatgacggtaataatccacgattgacggcgtagccccaatgcgtgagagtaccgtttgcgtcgcataagtctggagacatgaaccataattcggagaattatgtaacgtgaccacggcaatggtgggtttagtatcctttacattgtcagtcattattagttcctttccgcagaagatgcatatagatgaaggagcgcacagaattgggaacaagacagaccaatatgtgcggaatggtcgttcctaggaactggaagaatgtgaaatatcctcgtcgtaattgttcagctttaaatttccaaatatgaggaatatatgctggtccaccgcgacgtgcatagaaatctgggcttacgcgcattgcaaccaatggctcgttaatattcgcggccttgcatccggaagctagcattcggctgaatagatcccaatcttcgaaatacaaataatcggcgctatagtttccagcttccaaaacgcgtgatttacgaaacaccatggaagggtgacggaatggattgcgcttttttgaatatgagacaatcgactgttgatcaatcggaagatcagattcggcaacaggatggtctggatcctttataaactccacaatctgtgagcccaccatatccaagttatgatcagacatcacagccaactctttctccattcgagtcgaaaaagagtaatcgtcagagtccatgcgagcgatgatttcatttctgcattctgggactccatgagcaagggcactgcccagaccttcattcttgggcaaaaccaccaaatcgagaagtccggcatgctgctcatggaacacattgattgcattgtccaattcatgggtcaatggaccgtcctcaacgagaacaatctgctcgggtggaactgtctgagcaagcatgctatgtaatgcttctacaagatattcgggagattccttcgcatagacgctcataagaacgctatacggcaactccttactttcttttaaagaagcattcgcactagcatcatattgtgtttgatcacctactgacatctgccctcttcattcatctcccttgtaaatcagctgcaaacaagtaatcaaaaaactgccactagaaactctagtatgcaccattggggtgcagaaccgtgccgatagtacggagaatgtacacaatgtcccccaacaccgaccaattctgcacataggaaacatcaagctgctggctttcttcctcactcaggtcgttactgtttatgttcaataggattttgaggtttggaggtggtaccgttttgttggacttccttgttcctgccttctgattatgccacgaggccgagcttgcgccgccggtccatgatgcccgtgccgtactcggtcttgatccgcttgtcccggtaccagaccatgtagtcgttcggcatgtcgatgaacccgtccatcgaaacacccgcgaagcttctcttgtggaagaactcctgcctgggacgtccgaagaacccctccgcggccgcgttgtccggagaacagcctttcgcgctcatcgaacgcgtcaatttgttgtcctcgcagatgcggatccattccgcccacctataatgacagccgcgatcggaattaaaccgacatcggtttaattccgattaagccgggtttgttgttaagccggggaacggttcggggtcttggtggctggccgtgtcccatgtggtttcccggcttaacgttccgggttatttgagggtgtgtagttgtcggagtcgttgctcgctgagccatgtctccttggaggggtcggggccggggttggccgcatcgacggctttgcgcatcatgtcgagggtcgcgaacgcgtagaacgcgctggttgtgctcatgctttcgtggccgagcagttgcatgatgagcggtagcggcacgccctgttggtagaggtccatggcgcgggtccggcggatcaggtggcagtggacgcgttcgggcatggacgggcacgtcccgcggcgtgctctggccgccgcggttttgaggatctcgtcgatccggtccacggagagcggctggatggcgccgttcctcgtcgagtggaacaacggcctgtcgccgtcgcgcatggacggtccgggatggaattcctcgaggtaggcggccaggtgggttcgtgtcctttctcccaggggcacgacccggctcttgccgcgtttgccggtgagcgtgaccctggccggcttatccatacccacgtccgcgatggtcagtgcggcgagttcgccgatcctggcggcggtgtcgtacatgaggatcaggagcatgcggttcctgcgcgatttggcgtcgccggtgccccatgcggtcagcaacgctttggtgtgctcctccccgaggtggtcgacgggtttgcgcgcgggtggtttgacacgtatgccggccgcgtcgttgcccagcgcggtcaatgccgggtgttcgaggcccgcgtggtcgaggaacacgcgcatcgtcgtcatcctcagcatgatggtgcggtccgagtacccgcgctcggtccgcatccattcgacccaccggcccaggcgcgcccggtcgaaatgcccgaaaccgatgtggctgcgctgcgtgccttccgtggtttcgagccatcggacgtaggattccaggccgatgcggtacgcctcgacggtcttcggcgagctgccccgcaccttgggcagccagtggtgcagccagtcgcgcgcgactcgccagaagtccggttcaccggagctggcggccgttttccttgccttgctcatggttcctccgtttccgggaccacgcgttcggcgtcggcgacgaggtccgcgtatccgtccatgaaatcggggctggcgtgcacgtagtagagggtgctgtcgatgccggcgtgtcccatgtaggccgccagatagggcagcatcgccatcacgtccacgccgtcgcgagtccaccgctcgatgttcgcgaacgcgaaccggtgccggaaatcatagggcctgggccgtttgccggcttgtggccactcgagcccggcacgcgtccagacgcggcggaacaccacgccgggcatgcccggggagaccggattgccggtggaggtgacgaagaacgcgggacggtcgtctccgaagcgttcgcgggaccgttggtcgcattccagcagttcggcggcgacctcgtcgcccacgggcagtctgcggctgcgaccggccttggaatcgaccacgtcgatggaacgggccttgtggtcgacgtgcccgacggcgagtctcctgacctctcgggtgcgcagcccgcagcaggccatgagcatgaagaacgcgcgagactgccacgcccacggcgacggagactccaacgttcccgcggcccgcaggaacagggcggcctcgcggtccgtcagcaggtacggcgtcggacgcggggatccggccttccactggtcggagagcacgtacgcgtcgggatcgtgggccagtcgcatccacctgccgaagtccctgatgtacgagaaccacgagcggcaacccccgggattcgcgtcgatcctatgggcgatccatcgctccacgacgccccgctccagacgcacggccccgtgttcgaggcaatgccggtcgaacgagcgcaggacccggacgcgggtggcgccatgcctgcccatggacgccttgaagcggatgtactcctccaattcgccggcgagcgggccgacgaatccgtgttccgtgggtctcatgacgatccgccttccggcacgggcagcacgcacgcgagcattcccccgcggtgcgtggccatgtagacgcgtgtggaatcggggtcggcgtggccaagcaccgcgctgatcgtcggcaacggcgtggccgcctccagcatcctcgtcgccgcgttgcgccgcaacagcctggaaccgccccggcgtccgagcccggcgtgccgcatgacacggctgatcgcctcgtacaccgatgaatgaccccgaagcgcgacatggggcgccttgtaccgcacgaacacacggtcgtcgtcggtggcgggcctttcgtccaacagccaggacgccagcctcgcggccagcggtcccgtcatcggcacggtcaacggattgcccgtctttcgctgcaccagacctatgctcatggaatcccaatccacgtcggcgatcctcagaccgatcacatcgcatgccctcagcccgcacgtcagcgacagcagggtgatcgccgcgtccctcgacggcaccgaccgcgaggcgcacgcctccagcaagcggcggtgctcgtcgtcgggcaacgttcccgcgatcgcgtgggtcctgcgtatgccggccaggccgatcgcgtccgccaggtcatcccgcccgagccatctgaacaacgggcgcaggtccgacgcggcgtgccgcatcgacgactccgaccagcgtgaacgcagcccggccaggaaccccagcacatgcgagccatccgaaccgtccaacgacacgaccccatgagattccagccacgtgaggaacaagcccgccatccgacggtaatgccccaccgtcgccgaagccagtcccgaaccggcgagatacgcctcccaacgctccatgaccacggccaaacccggaaccaccggctccgcaagcctgctcctgcgccacttgcccaggtccaccgaaccggaccgcagatacgagtcgcacaaacgcgccagcctgccgtaatcgaaccaccgctgcctgctgaaaccgcccgtccgctcactgaaggtcgacgcggcgaaccccgcgcccaacccacgcgtgtacaccgcatccgggcctccggcgtaccgttccaacgccctgatggacttgcggtactggcctatggtggattccatataaccggccccgtaaagcgcgcggaccacctcgcccgcgacatggccaaccgtcgtctcacccatggcaaactccttcgttcgaatcaaatgggacaagacgaacataacccggaacgttaagccgggaaaccacatgggacacggccagccaccaagaccccgaaccgttccccggcttaacaacaaacccggcttaatcactgtggatgaccggtttctcgtcctcgccgagcgtggagcacgcgtccgaaagcatgccgttggccagcgcggcgttggggctcatgccgatcgtccaggcgaccggaagcccgtcgtagcagtcgatgatgggagacaggtacgccttgcccgccgggatggagaactccgtcaaatccgtgacccacagcatgttcggcctctcggcgtggaaatcgcggttcacgaggtcggctggcgccttggccggcccgcccttgtacgagccgtgccgcttcgcgctcttgcgcaacggcaccatgccatgcttggccatgagcctcatgacccgtttggacgacaccgtcatccccatgcccttcagttccagatggacgcgcttgtacccgtagcgcttctcgctgttctcgaacgcctcctcgaccaagggcagcagccacgcgtgcctgtcgggcccgttcatggcgtcgggctggtaatggtaggtgctatgcggaatgccgaccgcgtcgaacaggcttttggcggtcacgcccagcctctcaccggtccgcttggcgaggatggccttctcccggctggccgggttttccgggtctgcgcccggcccttttcccaacagctccagagtcccgcggcgaatcgcgatctcgacgtcgagctccctcttctcccgccgctgccgttcgacgtcggcgtccagcgcgtccagacgggcctggagctccgccaccttcctctgcatcgacgccaacgcgtccgccagaccggccgcgtccgacgaattcggaaccgcgggccgcgcgccggccggattccccgctctcgcgacggccttccctctctctgtctcggacaccggttcctccctggacttcgcaagcatctgccgtttccggtttctcacgaccgccgcctgaacgcccagcccggcggccgcctctcgtgacttcatcctgccggacgcgacggccaccaccgcctcccttttcagttcctcgggcaccggcccgtgacgcagcttgcgttggccgggcgcgagttcgtcgatccacgccatgagcagctccttgcttttggggtagcccagcatgcgcatggtgcggccgggccgtctgccgtactcgaggcagtggtccaccgcggcccgtttctgcccgtcgctatagcgccgatgccgttgcccgcgccccgagggaacgccggcacgctcctcctccggccgctcccggtaccacacatacagaatcgtcctgctcggataccccagctcatggatcacatccgcggcactgtgctcgtacttgatgtacaaatccaccgcccgctcgcgctgctgcctgctatacgtcatgccgacgctctccttgactcaacgagtccaagaaaacgtcaccacctcgtcccccccagacacggcaccggcgggttctagtgatcgttgcaacacctgacctaccgcaaggagggtcaggtgaccagaagccaccgaaacgaagaccgtggcggggaacaccgttggacgttcaacggcgtcgaatatccgacgaggaagctgatgtgcgaggcgagacgcgccgagtacgtgcgcctgctggacgaggaaggcatgaacttcacccaggccgcgcacgcggtcggcgtctcgaaacgcaccggcaaggcgtggcgcaacggcaggacgcgcgccacgggaaggaacgagaaacccctggtggactggtatcgttccaccatggacaaacccaagaccctccatccgcgatacctgagccaggaggagcgcatccagatcgcggaccgtctgcgtctgggcgattcgatccgcgccatcgcccgcctgctgggccgcgaccccggcacggtcagccgcgaggtcgagcgcaacaggaatcccgagtccggcggttacgagccttaccgcgcccagcagaaggccgcggaccggctcaaacgccccaaaccgcgcaaggcggccgagggcacgcgactgtgggacgagatcgccgccgggttgcgcaggcattggagcccggagcagatagccaaccggctgaggctggacttcccggataatggggatatgcacgcgagcgtcgagacgatctaccaggccatctacctgcaggccaggggcgaactcaagcaggagctgaaacgcgccatgaggcaggggcgaaccgcccgcagaccccaaggcggccaaggccgcaaaccccgtttccgcgaacccatggccatgatctcggagcgacccccggagatcgaggaccgggcggtcccgggccactgggagggcgatctcatcaccggcagccgcaacaaaagcgccatcggcacgctcgtcgagcgcaccaccaggttcacgatcctgctgcacctgcccgacgggcacgacgccgaacacgtccagcaggccatcatcgacaagatgcagcacctgcccaaactcctgcgcaacagcctgacctgggaccagggagcggaactcgccctgcacaaacggatcggcgcctcgctggacatggccgtctacttctgcgacccgcactccccgtggcagcgcggcaccaacgagaacaccaacgggctcctgcgccagtacttccccaaaggcaccgacctatccgtctacccggaggactacctcgacgcggtcgccgaggaactcaacgaccggccacgcaaaaccctcgggttcatgaaaccaagcgagaagatcatcgaactgctcgacgccgcgtgataacctcaacaaccgacaacatgaccatggaaggccactcaaacctcaggtgttgcaaccaccactagaatccgcccacccagacatgattcggccggcttcgtgcgatggactcaatgcaatcaagcattgtgagcgtttattctttgtggagtataaaaacggcaatgtcgtagctaaaaacgggcagaccaacgagataacactcaagtcaaaagccggccacgaatattgagaaaaagctctacgactcagtactcatgttggaatatgagggacttattaatctcgccgtgagccgcaatcaatgtattgctcttgttgttgttcgcaatgatgctgtcccacgaagcgaagcagaagcagattccttgcaactcaccgcaaaccctgtatttccgcagctcatgagaactgccgacgaattcaatatacgaagcgctgccggattggcagaaaaactataccttgctgtcaaggtcgtcattgtcgatatatttgaacgagactatcttccgcatctggaaatatgcagtatagatacccgtatcacaataaacactcataccgtataagcatactgacgcgtaatttgaggccgtaccggggcttcctcaacgcggtagtgcttacgcatgctggtcaggatggtgcgcagcgctttgttcgtctgctctgctgcggtacggaacttcgcgtattccttgccgtgcggatcttcaatatcctcaggctcagggagcattggccgaataatggacgcggagttgatcactgactgcaagcgttcctgaatggtcaagcccttgaccagtccattgcgcgcgcagtactcacacatgttcgcaaagtcgcccagcaggaacgtgtatttcacagcagtgggagccaacgtgacaatgtctttacgctgatccttttcaaagcacaggatcagatcagcggactttgccatcggctgcgtcaggcgtcgagaacggaacccactcggttcgattcctacgctttccataagcagggcgctgttgggatcaatctgatgcatgggcaaaccatgcgtacccgcgctggaaacctgcaccgtggtgccagagaggtagcgagtgagcaatagctcacccataggagaacgacaaatattgccggtgcagacgaacataatgtgcatgggctcagtccttcttcatacttacaacgctaccttgcgggcctgcgtacaaaccactagcgcaccattttagtccgatacgtcggactgtgaccaatccgcgtccgcccaccatcactttatcttcacagaacgctaatgggaaattcgtttttttgagcgattttgctatagggggggggggcggactcatggtaggctctgcaacagagatgaaattaacatgatttccttgcagtttcaggaaataccttaaggggatgaagttcacgtaccatgtcaagaatcagcaccacggcatcagcaacggctcaacatatgagcaacaccacagcagagactgagacactgcaccgagtgcaaatcagccgtgctcaggcagcacatacggattctcacattgcggacgcaactcctgatacggctgcaccaacattttttgacggcacttacttctcgtcttctccggatggcaccgttactcataacgatgctggcgataggcctcatctcaccgaatattcagtgcccaaatggcgttatctgtacaatacgaccatggtgattctggatctgctgatgaccatcatcgccacctgcatcgtattcgcgtgcaatccaggagcatatgccaatgtgcagaacatgggaccatccgattatggtgtattcagtttcctgagcttggcctgcatctcctggctcatcagcctctatgcagctcgaagctacgaacgccacactatgggcgagggatacggactatatgccaagctgcttaatgcggcctttatcgacttcattatgctctgtacattgggctacttgttccatctgaatgtgccgcgttccctgaatgtatttattcctatcctttctctcatcctcgttatcgttgaacggtggctgatgcgtcgtgcgcttcaccgcaatcgagcaaaaggtgagttcaactaccccactattatcattggctctccggagggcatcagtaaaacgctgaagcagctcaaggcatgcctcagcctggggtatgcacccatcgcggtctgccctgttgcctctgtgtgtgattcggatgacccgaatgctgctcaacatcttgtatcggttccgtttattcctgccaatgatgaagaagcgcggctcaaggtgttggcgttgaactcccatttgcctcagaccgccaagcggatgaaggttcgcactattctgatcgctgatgtgctgacgcgtgattctgaaaccatgcgtactctttcgctcgctgttgaatctatgggcatcgagctggctcttactgcatccgttgcagatctgagcggcgcaaacctgcagctacacaatgacccctctatgccgattttgacagcccgacttgcacagtattctctgccgactcgcatctttaagcgtgtgtgcgatatcgttctctccctggtggcaatcattctgagttcgcccatcatgctatgggctgcatataaggttaagcgagaagacggtggccccgtgttctactcacagactcgtatcggcatctacggcaagcctttcactatgtacaaattccgttccatgcggctgaacgccgataagatggatgccgaagtggctgccgcagctggcgtggaactgggaacaacattcaaggtcaaggacgatcctcgtgttactaaaattggtaagttcatccgcaagacttccattgacgaggttcctcagttcttcaatgtgctgaagggcgatatgtctatggtgggtccgcgtccgcaacgtcaatatgaggttgaccagtactcgccactgtattccactcgcctactggtcaagccgggtatcaccggcctttggcagatttccgggcgtaatgatttgtctcaggaacagtctgaatatgcagatgtgtcatatattcagaattggtctatcacgggggatatcgcgattctgctgaagactgtgggcgcggtatttaatgggactggtatgtagttctgcaatgtagagggcgtcagctttttgctgacgccctcttgtttttggtctctctcctcaggcagccgtttgtggctgacagctcccttgtcagagggagctctttttactgcttgttgatggagcaggcagcagtgtcggtggtaacaccggaatcaatccagcccattggagtttggtcgatagtgaggtcggagacagccttggtggacgtggtcacgtcgaaggaataggtgacggactctccaggagctatcgtggcattgctcgcatacacggttttaccattcaatgtttcttgacggctctccgtcactgaaccaccactgatcttaagattcgagatggagcccccggcaggcgcataaatcagagttttttccacaccttgtcccccggatccaagaatatagctcgttagagcaccaatctgactgctctccagtgtatttgtcatcttatattccacatgataggtctgagaaccatcattaccacaggtggaacgagtcaccttcgaagtacgatgaatataccatcccatctttgatggattctgctcagtcacatacactcccacctgcgggttttcctcgctgcttggcgtctgcgcggtaaagcctgcatcactaatggttttttcagcagtctcgtcgaatgcgtacatggagaagtggcggccttctgatatggcctgatttttgttccgcccttatagtggggcggaacaaaaatcaggccatatcaccccggtcttgtgcacaaagcgtgttcgccctccgcttctgcacatattccgaaccgactggaccacccctgggtatagcgtattggggtgctttgagaggctgctcggccaagcacgcgaagacgacggtcgccgaatacaccgaatacgcattgatatgcgaggcgcatatatcactgaacagatgcgccaccgacaccgccaaggcaacaggccgggcaacagaagtggggtagtgcgtgactggagctcagggaatcaagaatcgtcgcggcgaattgcagcgggtactgagccgtgaggaatcatacgtggacggtaaactgagccgcgcggcatttatttccatcgcaatcctgacctttattacctttgtcggtaatttcacgcagctgcagctgagttccgcgctgccgattatcgtttccgaattccacatctccgtaaccaccgggcagtggctcacctccgtgttccagctggtcatgggcgtcatggtgccgctgaccgcgttcctgacccgtcgtttctccacccgccagattgtaatctgctcgatggcggtgttcacggtcggctccctgctggcatggttggggccaaacttcgtatgggtgctggtcgggcgcgtgctcgaagctgccggcacgggcgtgatgtggccggtgctgcagatcacagtgttctcgatctacccgctgtcccgacgcggctttgctatgggcaccgtgggcatggccatgagcgtggctccggcaatcggccccaccttgggcggctggcagaccgatgccaatggctggcgttccatcttcctgaccatgaccgtgattggcgtggtctcgctgctggcggccatgttcggactgcataatttcggttcgcatgacccgtctgcccgcgcggactttttctcggtgagcctgtcggtgattggctttggcgggctgatgttcggcttcaccaattcggagacctatggatttacggcgccggtaacgtggggacctatggttgtgggtctgatcggcatcgtatggttcgtgctgcgtaacctgcgcgccggcaagcgctatcgtgaggccgtagccaaggacaagtcggcactcccccagccgccgctgctggacttggaagtgctgaagaaccgttcgttcaccgtcggcaccattaccgcgtcgctggcatttttcgccttcagttcgattctggtcatcatgccgctctacatccagaccgaccgtgggtattctgccacgatgagtggtctgatcatgttgccgggcgctatcggccagtgcgtctcccagttcttcggcggccgtgcgatggatcgattcggcgcacgacccgtggctttgttcggttcgattgtgttgacccttggcaccttgggcatgtcgctggtggcgatggatacgtggatctggtgggtgtcaatctgccagttcatccgtcagatcggcatgggtttcctgctgatgccgattaccacgtggtccctgaattgcctgaacgggccgagcgaagtgtccgccggatcatcggtgacgaataccgcgcgtcagattgcgggcgctgtgggcgcacccgtgttggtgattctgatggaaacgtttgccgctttgcataagcagggcggcgcctccgccgtcgccgcttcgattttcggcattcaatgggcgctgcgcatctccacaatgatctgcctagcaatggtgttgatggtgttcttcggcgtcaagggcgacggtgccggtcgtacgcgagacattatttccctgcgttcgctgcgcgaacggcgtgcgcggcgtatggctgcgaactgacggcagatccaaccattctcaacataataagaaaccccggtttccaacaccggggcttcttattatgttgtgctatcgcaggatttcagctggagtctattacgccctgcccattagcgtcaggacaatcagcagcacgttgagcgccacaatcagcgccacgacgatcatgaaaatcacgtgcttgacggggccgtcaacccacttgcccatgagttccttgttatgcgtgtatcgcatcagcggaatcacggcgaacgggatgccgatggaaagcaccacctggccgatgaccagcgcctgagtcgggtccttggcgaaccacagcacaatcagtgccggcaccagcgtgaccacgcggcaggcccacatcggggcgttgacgtgcagcagaccgtgcatgatttccgagccggcgtacgtgccgaccgatgtggagctcagcgacgaagccagcaggccgatggagaagatcgtgccgatcaccgggccgagcacctgcgtgatcgcccgctgtgcgccgtcgatggagtccgtgccagacatgccatgcagcgagttggcggcgagcaccagcatcgccagattcacggtgccggccagcaacagcgcccaggccacatcgattttcgagcctctcagctgcgttttgatcgacggcttttcgccgcctgcgtaatggtcgttcaccagcgtggagtgcaggtagatggcgtgcggcatcacggtggcgcccagaatcgaggcggccatcaacaccgagtcggcgccttggaagcgtggaatcatgcccttgaccacttcgccggggttcggcggggctacgaacagacccgcgatgaaaccgaacgtaatcaccagcagcatcacgatgatgatgcgctcgaacgtggtttgcgtcttgccgccttggaaccacagcatcaccgtggagattgtgccaatcaccaaaccgccgatgaacagtggaaatccgaacagcaggttcagggcgatggcaccgccgatcacctcggccagatcggtggcgatggcgatgacctcggcctgcataaagaacatgaatcggccggcgtcgctcatacgctcacccagcagttccggcaaggatttgttggtcacgatgccgagtttggcggactgatactggataagcacgctcatggcattggcgagcaccagcacccataccaacaggtagccgtacctcgcaccggaggtgatgttggccgccacattaccaggatcgacgtaggccacggccgccacgaacgcggggccaaggatactggccagcgcatggtcatgcggctttttcttgttgttcgcccctgctccggtcccggttccgactccagcaagctggcgttccttctcgatttccggtgtttcctgttcgatgtctgccacagcgttcgtcatagtggttgccgcagtggcatctgccgcggtgtgtgttaccgccatatcgtttgtacctgttcccttcataccgcgcacagttatagcgcaggcatgtttcccgagtcaacaaacagacaatctgcggacgattggtggatgaccggcggactggcagctggcatctcccgccatctcgctcatgaaatgtgaaaaaccgccgaaaactcgctcatgaaatgtgccagacggtagaaaactcgctcatgaaagtgtaaaatcattgatatagcagtaattcggaaaggggctcctcatgtatctcaaacgcaaagccgatgcctatctcaatgcatggaaatccgacccgaatcgctccccgctaatcatcaagggccctcgtcaagtaggcaagacagagactatcgattactttgccgcacacaactaccgttcggtagtggaaatcaacttcgttgaggaaccgaaatatcgtgcaatcactgcggacggttatggcgcgaataccatcgtccgcaatatttccctgatcgacccagccaaaaagttcattccgggcgatacgctcatctttttcgacgaaatccaggcccatcctgatatcgtcactgcactgaagttctttaaaatcgacggcaaatatgatgtgatttgcagcggttcaatgttgggcatcagctataagcaaatcgaaagcaatagcgtgggatataagaccgactacgaaatgcgatcgttggacttcgaagaatttctgtgggctcgcggatacgatgaggccgtcatcgaaagcatgttcacccacctgtgtgatgctacgccattctctgaagtggaaatgaacgtcttctccacggcatttatggattactgcgtgcttggcggcatgcctgcggttgtcgcctcccatatacgcactggcacgttcgagggaacactgcaattgcagcgccagcttattttggactaccaggaggatatccgcaaatacgcgcaaggactcgatcaggcacgaattctcaacgtgttcaaccatattcccgtgcaactcgccaaggaaaacaagaagttccaaatcagcaaggttgccagcggagcgcgtttcaaagactatcgaggatgcgtggaatggcttgaaacctcgggaatggtgaatatctgccgatgtatgtcctatcctgaactgccgttgaaaggcaattatgacgaaaacaagttcaagatatatttcggcgataccggtctgttcgtagcgatgcttgacgacgaggccagtgatgatctgcgggccaatcgtaatcttggtgtctataagggtgctatgtacgagagcatcgtctctgaagcgctacggaaatccggctatgacctgtactactacaaaaaagaggattccacactggaacaggatttcttcgtccgcacgcgcgaatggctggtgccggtggaggcgaaatcgaaaaaaggcaccgccaaatccatgcggacgctaatcgcttcggattcttatccggaaattcagttcggcgtgaaactatccgccggcaatatcggtagcagcgaacacgtgttcaccgcaccatacttcaccacatttttgctccgacggctcctgcgcgcttatgacgaggggcaggcacctatgctcaacaatcctgagcggtagcccctattcgtctgcgggcacggcctggcccgggcaggtatggaggacggcgagcatggcgtccttttcttgggaggtgacggtgagctggtacttgtctttgacgccaatctggcgggccacgtagtcgcaacggtagtcggcgttggtgggtagccagtaggcggcggaagccgaacccttctcctgattggccggaccgtcgacggccagcaggttataggggtcattgccgaattcatggcgtttggcagtggaccagtcgtgcgcaccggattgccaagcgttttcaagggccaccacatggtcgatctgcactttggcgctggtggcgcggccacgtacgaaatggatggtctgagcggtgtacggatcggccagtgtgccggactcgaccacacaggaaccggcgtatttgtaggtgatgtccgtgagatcacgggcgagcacgtcgtcgcgtacgtcgcagccattgccgtcgacgtcggtggtgcggaaaccgaaggaatcgcggtcgtagccggaggagctttggttgtcgtctacggcgagcgcgttcaaagtgtcggcggctgaaccggtggcagtgtagccaccggtgattttggccacgtcggagctgacctgcggcagtaacaggccgatggtcacgccgattgctacggcgagaacgatgagaatcagcacgcgctccagcggtccagaggcgttgaaacgacggcggaagtgggcgttacgacgtgccatcaatcacgcataggtgaaggtgagggggtcgtggccggcgcgggtggggccgtcgagggcgtcgatggcagcgtgttcatcggcggtcagggcgaagccgaacaggtcgagattctccctctgacggtcggcatgcacggacttggggatgatgatcgtgccgttttcgatgtgccagcgcagaatcacctgggccgggctgacctcatgggcggcggcgatcttctcgatggtgccgtcgccggcgttgaggtcggcgccacgcgccatcggcgagtaggcctccacggcgatgccgtgcttcttgcagaacgccaccacttcgcgctgctgccacgtggggtgcagctcaatctgattgacggccggccatgcgccggtctccccgtgcagacgcttcagatcggcgggcatgaagttgcatacgccgagcgtgcgtgccatgccttcgtcgcgcagcttgacgaacgccttccaggtgtcggtgctgcgccagtcgaacggcgtgggccaatggatcatgtacatgtccacgtaatcgagctggaggagtttcagggagttgtcgaatgccttgagcgcggagtcgtagccctgctcggagtcgcgcagcttggtggtgacccacagggtctcgcgcttggcgccggtgttgtatccggaagcggcgagcgcacgacccacgccggcctcgttgttgtatccggcggcgccatcgatgtggcggtatccggcttccagcgcagattcgacgacaggggccacgccctcgtcatcgatacgtagcatgccaaggccgacctgcggaatggaatggccgtctttcaaggcgatgtccggcatgttggcgggattgatgtgtccgttggtcatggcttgtgatgctcctttattgctgcgactacacgccactgtacacggttatgtgggtgatgtgcggccggtgtgcagggagcgtacgggtaaacggcatgattatgaccggccttccatgtgggaaagccggtcataatcatgacaacatcacgctctactcctgcgaccggggcctcgtcccattgttcccggacgcgaatttgcctccaaccacaatgatgcccagcgccattgcggagcccctcttcccctcctctgggcacgaatttgtcccggtgaaaacgtcaatcgattgacgtttctaccgggacagaaatcgttgtcccggtacgcaatttcggcccatttttgagaaccgggacaaaccaattttcaaagtccacataccccgacaagcagaatcggcggaataccgtcaatcccgagatcgacatgttgtcccggttcgcacataaaacgattgacgctcgtatcggggcaacgagaattgtcccggtacgcgaaaaacgcccgttttttcaaaccgggacaatgatttctgtcccggtattaacatcaatcgattgatgcgcgaaccgggacagaatcgcatcgctacgccgagacagccacatctggcagacgacagccgacagccagcaactggcaaccgcatcataatgccgagtcagtccttatcaggagcgcttacgacgcaaagcaaacgagaccccgccggctgcaccgagaacgacgaccgcaagacccacggcagtcaccgcgctaccggtcttgctcagcacgccagtagccttgttgccattcgcaccgttggtcttatcgccatcgccatcgttgtcgccgatattgttcacggcctcggcgaccatgcgaatctcatcggcctggccttgcgggctgatgtcgtatttcttgaggttatcggcggttactttactgggtactgtgttggaatcgtcgtcgccatcatccaaggtgtatgcccacgacgtttccgccatggaacaccggcaacaacgtgctcgcgtggcatggcgtgtactggcgacagtcaccacggcgaccccgccatggaacgtggcacaaccatgcgggggacgctctatgtgcattcagtcatgctgccgatgctctttaacttgcatatccacgggggcggcacgaggcaatttggccgcctttacccgtacatccatggggcggcgaaaatcccatggggcggtaacttgcccatggggcggtcggtaaaattttaccttccgcagaataaagccattttcagccaccgccccatgaggaattcaccgccccatgggccaatcaccaccccatgaaacagctcattcgcacagcaacactatttgccgagcaacacccgcttggcgagttcgggaccgtattccgccaatgcggaatcttccgacgcgacgctggcgtggccaccattatgctcaccattgtcaccaacaccaacaccaacaccaacaccaacaccaacaccaacaccatcgtcgttaccaccaccatcgccagccgtcgcaagattctcagtgagcttggcgaccagacgcgcatgggccttttcgtcgatcttcacgaaaatcgcgaacacaatcaggccaagcacaatgcacaccagcggaatcatgaaggcgaaggtcttgaagatggtgatgtccttggccgtcatgtcggcggcggtggcggaaccgatcatgccggcggccacggccacgaagccgacgaagccgttggagaatgcgccggcgatcttgtcgagcatcggacgcacggacagcgtcacggcttcgttgcgtttgcctgttttcagctggccgtattcaatggagtcctcaaggcacacgatcacggtcatctgaatctgggtctgcggcaggtagaacagcactagtgccaccagcagcagcggtatatttgtggaggcgacaatcagcagcaggtaggccacgaccatcacggacatgccgatgaggaacagataacggcggggcacccacctagtgatgaccgggaacagtaccgacataatcagaccgcacgcaatagggatgacgccggtgaccgggaaaaggtccatgcgaccaatcacgtatttgaacaggtagaccatcacgccaccggtggccacgttggcgacggcgtagaacacataagacaaagcggtccacatgagctggtcgttgtgaatcagggcgcggaacgcttcaatcgggttaccgttctcctgggccttggtgcgcagcgtgctctgtttttccttgacaccgaacactacactcagagccgtgagagcgccgagcagggccacgatgatgatgaacgcggtccaaccattctggttctgctggccggcatcgaagctgaagaaggtgacgatgggcatcacggcgatagtcagaccgttgtacccgagcgatccggtgaaggtgccggctgcggtgtagatgccgcgctgatgggagtcggaagagatggaggggatcattccccagtaggagatatcgcgcagggagtagaacacatcgagcaccacgaacaccaccacgaacaggacgatgaacagcgtggtgttgacgttgaccaagccgaacaggccagtgtagaccatgacgatcagcacggcggacaccagaccgccgatgagctgccaagggcggaatcgcccgagtttggtggtggtgttatccaccaggttgcccagcagcgggtccacgaagatttccgcgatacgaatgatcacgatcagcgaggtgatgatgccgatgagcttgcccgccacggccttgtccactccggagaacagcgagttggtcacatagaccacgaagtaggtgcttagcgcgttgtagaacgccgactggccgaagttgccgagcgcgtaggccacaagtcgcgcgggagcaatggcctctttctcatcatgatgggattgcgtagacgattcagttgatgccgtcatcagatacattcctccagattccatgtacgcatatcagcgatgttgcggcaattcacacatcgcgcgtgcgatacaccggtaaaccaaaaaataatatacaccagaccgtagagaaaacacacataaagttgctacttaagcacagaaattaacaaaaagtcactaaacgattgaacggggcagattctagtggtggttgcaacacctgaggtttgagcggccttccatggtcatgttgtcggttgttgaggttatcacgcggcgtcgagcagttcgatgatcttctcgcttggtttcatgaacccgagggttttgcgtggccggtcgttgagttcctcggcgaccgcgtcgaggtagtcctccgggtagacggataggtcggtgcctttggggaagtactggcgcaggagcccgttggtgttctcgttggtgccgcgctgccacggggagtgcgggtcgcagaagtagacggccatgtccagcgaggcgccgatccgtttgtgcagggcgagttccgctccctggtcccaggtcaggctgttgcgcaggagtttgggcaggtgctgcatcttgtcgatgatggcctgctggacgtgttcggcgtcgtgcccgtcgggcaggtgcagcaggatcgtgaacctggtggtgcgctcgacgagcgtgccgatggcgcttttgttgcggctgccggtgatgagatcgccctcccagtggcccgggaccgcccggtcctcgatctccgggggtcgctccgagatcatggccatgggttcgcggaaacggggtttgcggccttggccgccttggggtctgcgggcggttcgcccctgcctcatggcgcgtttcagctcctgcttgagttcgcccctggcctgcaggtagatggcctggtagatcgtctcgacgctcgcgtgcatatccccattatccgggaagtccagcctcagccggttggctatctgctccgggctccaatgcctgcgcaacccggcggcgatctcgtcccacagtcgcgtgccctcggccgccttgcgcggtttggggcgtttgagccggtccgcggccttctgctgggcgcggtaaggctcgtaaccgccggactcgggattcctgttgcgctcgacctcgcggctgaccgtgccggggtcgcggcccagcaggcgggcgatggcgcggatcgaatcgcccagacgcagacggtccgcgatctggatgcgctcctcctggctcaggtatcgcggatggagggtcttgggtttgtccatggtggaacgataccagtccaccaggggtttctcgttccttcccgtggcgcgcgtcctgccgttgcgccacgccttgccggtgcgtttcgagacgccgaccgcgtgcgcggcctgggtgaagttcatgccttcctcgtccagcaggcgcacgtactcggcgcgtctcgcctcgcacatcagcttcctcgtcggatattcgacgccgttgaacgtccaacggtgttccccgccacggtcttcgtttcggtggcttctggtcacctgaccctccttgcggtaggtcaggtgttgcaacgatcactagaacccgccgcgtctcttatcgtgggggggggggagatgcacgaactcggagcggagtgaacggctacctccgatgacacatggggccactcaaacgagtgacaattacgagttacgacgggagatgacaatgttccgcaaggctcccctcagtcaccttcggtgacagctcccctcagggaggggagccagattagcgtcagcgcgtggaggcgcgggcgatgacctgggattcggtggtgagcagttcggacttggtgatgctgccgtcgatgcgtccgaggatgcgatccactgccgtgggagccgtccagtcaaggcgggaatccatggtggtcagcggaatctgcaggtagggggcttcctcgttgttatcgaagccgatgacctgcacctgcacgggcacctcataaccagcggtgcgcagagcagtcaatgcgccgatggccaactgatcgttcaaggcgatcacaccgtcgaatggcacgccggaatcaatgagccgctgggtcacacgggcaccggctccgatggtccaatcctgatcggtgttgccaatcagctgcggatccaaggagagcccacgcctacgggtctcttcgatgatgccgcgcagacgcagctgcgcgttgccttctacggcattcagcaatgcatcttcgtcgtaaacgtcacgggcaccgatcactgcaagtctggtggaaccgcggtcatacaggtagcctgcggccatggcggctgcggatacatcgtctggggtcacgtgatccacaatgccccacgtggtacgcgcgccaacgatgaccagcggaaaatcaaccttcagatcatcgggcgaaatgttttccacctcgctcatggaaaggatcatgccatcggacaccgtggagttgaacttcttcagcagatcgcgcgcgcctttcgcggagccttccgcatacgtggtgacgtatacggaatagtcgcgctgacgggcggcctcgatggtgcggttggcgagctcggccagatatggcggaatcagcgaaggcacggcgagggtgatgaagccggtgtgatcgcggttgaggttgcgggcggccacgttgactcggtagtcgaggtccttaatgaccgactcgaccttggcacgggtctcatctgtcatacgcccggagccattgatcacgttcgacgcagttttgagcgatacaccggcggcctgagcgacatcgcgtagcgtcactcgacgcttggctgttttctcgtcgctcatgccgcgctcctccatccggacaacattgccattctagcgcggtttagcaggccgttttagcgataagaatggcgttgcggttcagcgtatatccaacggcgtcagtctcgcaacggtgggcgatgatgggatcaccttccacaccgttgatggcgacgggctggtttgagcggttgaggtagaaatcgaagcgggtggagccgtctgcggatcggcggatggtgtgcaggatgcggggatctgtggtgggataggttggagtttgactactctcagtcggctgcgccgacaactcctgccatcgggagccaagtgctttgagcaactgggcaatgtcgtgacggttgaggtcgcagcccacgtagatggcggtaccgttgccataggggcggctggtgatggcgggggtgcgctccagctcccagtcggcggcggactcacctgcgtaagaggcaagcactgtggtgtccgcggctacggaagtcacgtcgttctgccacaggcgggtcgtcagaccattggacaggctgatttcgctgggctcgccttcggcttcttcaccgaggatgttgaattcttcggagcggatgccgagcatgtcgcgtaggagcccgttgccggcgccggggtagccgccgaggccgatgtggaagtgctcgtcgatcaggccggcggcatagccgacgatgacggttccgccggccttcgcgaagtcggcgatacggagaacgtcttcgtcggacaggctgagcacggtgggcagcacgatggttttgtagccggtccagtcgtaggcgagcggcaccacgtccgcgcgcagcccggcatccaggaagccgcggtaccagtcgcgcacgtcgtgccagtggttgagtttcatgctgggcagggtttcggagcgtgtggcccattcggattccgcgctgaacaggatcgccgtgccggcacgctcgagctcagtgccctgcagcccggcgtcggagagggtcttcagcgccttaccgagctcgcatacgccgcggaagaccttggaatcggcgcccgcgtggggcagcatggcggagtggaacgcctcggcgcccgacttggattgccgccattggaaaaagcagatggcgtcggcgcccatggccacgtgggccagggagtcgcgcatgagttcgccggcccgtttgcgtgtgttcagcggcttccactgcacggctgaggtggagtgctccatcacgtaccacggcttgcccagcgcgagggagtccatgagcgcgtccgagcaggcgagttcgtccaggtgggattcgccctcatggaagtagtgatcgttggacacgaagtccacctcatccgcccatttggcgtagttcatgacgcactggtcggtggagaccatgaagttcgtggtgaacggcttgtcggggcagatctgctcgatggcgtcgcgttcggctttgtagaagtcgagcagcatgtcgttgccgaaccgctcgtaatccaactgctgcgacgggttgaccatggcgtcgccgcccatgtgacgtggcagcagcacctcgtcgaaactgttcacgtgctgcgaccagaaggccgtgccccacgcctcgttcaacgcgtcgatggtaccgtacttggcctcgcaccacgtgcggaacgcggccaaggcgttgtcggagtagtcgtagcggttgttccagccgtattcgttgcccatgtgccaggcggtcacatacgggttgtccttgtagtgttcggcaagtttgcggcacaggcgcagcgcgtattccttgaacaccgggcttgtgggctgccacgactggcgtgagcccgcgttgacggtatgaccataccggtctaccggcagcacctctggatgggattcgtacagccacagcggcgcggcggctgtggcggaggccaagtccacggcgatgccggctctgccgagcctgtcgatcacatggtcgagccactcgaacgtgaacgcgccctcgaccggctcgatcttgtcccagctgaaaattgccagcgatacgacgttcacgccggcctcacccatgagacggatatcctcgtccagcgtctcctcgggccactggtccgggttgtagtcgccgccgaacgcgatgccgcggccggattccgtcagcagggacggccacctaaatgctctatgagtagtcatattaatcaaatcctttattgtatcggtttgcgggaagtgctgtgcttgcaggttgtgaacaccagagaggccgcccccgctggcggggctgtcagcgaagctgactgggggtggtcgccagtcgaatccccatatgaccaccctcagtccgctccgcggccagctcccgtcagagggagccagaggttactccttgacggcgcctgcggcgaggcctgactgccagtacttctgcaggcacaggaacgcaatcaccagagggatgatcgtgatcagcgaaccggtaatcacgaggttttggatagcttgaccgcctgcggttgaagcctggtccttccactggttcagaccgatcgtcaacgggtaccagttggaatccttcaacatgatcaacggcaggaagtagttgttccacgtcgctacaatggcgaacaatgcagtggtcacgatgccgggtgccaacagcggcagggaaatctggaagaaggtgcggaactcgccggcaccatccacgcgcgcggcttcaagcagctcatccggcacggcctgatcggagaagatccacatcagatacagaccgaacgtggataccaaactcgggataatcatcgaccacggggtgttcgtgaggcccatcttggcgaacagcaggaactgcggcacggccagcgcgatacccggcaccgaaatggcgccgatgatgatcacgaagcacagcttacggccggggaagcggaacttggccagcgcatagccgcccatgatggccagcaaggtggcaccgccggctccgaccaccacatacagaatcgtgttgacgaaccagcggccgaagataccgtcctgataggtgaacaccgtggcgatgttgtcgaacagggcgaacgttttgccgaaaccgaggccgaacgtcgaagtgaagtcggactgggtcttggtggcgttaatcatcaggtagacaaacgggaagaggcagtagaccgcgaaaatcgcgcacacgatggtcagggccatcgagcgggtcgggttcgccgggttggagaaaccggttttggcggcgcgcttgcgctcggccttctcgtcggcgtcgatgcgcttctgacgctccttctcggccttcttggcggccttttcctgagccttgagatcggccagggtcatggttgttgttgaagtcatggttgcagtgctcataattacttcatctgctccttcatactcttaagctggacgacatacgcaatggccatggtgatgatggccatcacgatggccagagctgcggcatagttgctctgattgccggtgaagctcaggttgtaggcgtacatgttcggcgtgtagtacgtggtgatcgcgttgcccggaaccatgttctgcaaaatgctcggctcgttgaacagctggaagctgccgatgatcgagaagatcaccgtgatggccagcgagcccttcagctccggcagcttgatcttcttaacaatctgccactccgaagcgccgtcgatggaggcggcctcatacaagctgtgcggaatggtgcttagggagctgtaaaaaatcagcatgttgtagccggcatattcccacgtgttgatgttcgcgatggatgcaagcagcacgtcggggttgagcacatcgatgttggtgccgaggaagtcgttgagggagccgaccagaccgtatttggcgccatacacgaaaccccaaatcatggtggagaccactgcgggcaccgcatagggcaggaatgtggagatgcggaagaacttggtgccatgcagcttcatcgaatccaaagcgagggccatggctgcggccagaaacagcatgatcggcacctggaatacggtgaagatagtgacgcggcccaccgagctccagaactgcggatcctgaatcagtcgggcgtagttctcgaagccgacgaacttggtgccgccgaccatctgcttcttgaagaaggagatgtaaatggcgtacacaattgggatgatgaacacgaagacgaacaccacggcgaacggccacatgaacttccagccgcgccagtcggccttgtgcttgttgacgcgggcctcggccgtgtgcagatccgcctcctcaggcaggattcccaccgttggctgcggggctgcggccattgtttgatcggacataatcgattgctttcttggaatacggattgctgtgctgcgcccgctaccagggggtcgctcgattggagcggtcacgtcaggcgagggcacgggaaagcggggacactggggagcatccccgctttgggagatcgggcggctaggcggaaggagagtggcctagccgcaggttttgattgttggtcagtgccggatgtaccggcaatagatcggttgcgtcacttgacggtgacgttgtagccctgctgcttgccttgctcggcgagcttgttggcatagttttcaagcgccttctccagggtgatgtcgccggagtaggccttggagacttcgtcgccgtaagcggtctgggcgtacgggttgtacggcaggtactggaacttctcggtcgggcgctgagccgcggcggaaaggacttcgttgacgttctgaccgccgaagtagtcgttggtcttcttgttggactcggtggtcgggtcggtgaaggagtcggaccggaggatcttcttcagggacgggaaggtaccggtgtcggccatggtctgagcgccctcgccatgagtcatgtactcaacgagcttgtaggcagcggcctggttcttggactgcgaggtgacggcaagtgcagagccaccgtcttcggcggagacttccttgccttcctcccactgcggcagctgggcgacgcgccagttgccggcctgatcgggggcgccggtcatgaggttgatcggcatccaagcgccgatggtcagggaggcgagggtgccatcgttgagctcgcggttccaatcgtcggaccagttcggggtcttggcgtccacgaggtcttcgtcgatgagcttctggacgaattggatatagcgctgcatgccctcgtccttggtcatgttgatggtgatgttctcgccatcgaccttccacggctgggcaccggcctgccagatctgggcggtgaacggctgatagtcgttggaggtaccggccagattggtgatgtaggagccggtggcacggatcttcttggcggcctcgtagtagtcgttccaggtcttgatggactcgccgtccacgccggccttgtcgaacactgccttgttgtagaagaacatttcggggccggaatcaatcggcagagcgtacggcttgttgttgtactggagcttgttccacgggccggcggcgaagtcgtcggcgagtttgtcggcgccgaattcgctcaggtccacgaggccatcggtgacggcgaactgggtgacggtcggatcttcgagcatcacgacatcaggggcgccgttgcctgcggcgatggcgttggagagcgcggtggaggtcttctcggcggtgccggtgttgttgaacttgacggtgatgccggggttggccttctcgaagtcagcgaggatttccttcatcgagttgccggaatcccagccccagaacacgagttcggccttgtcagcgtcacccttgttggcaccgttgtcgttgctgctgccgcaggcggcgagaccgacgagcgtggccacggctgccgttgccgcgatgaccttcttggtgttgcgcatgttatctccttctggaccattggagttgacttgcgggtggttggctttcttccgactggcttccggttttcgtccggttacttctcggttatcttccggctgtctttggctgccttccgattgttgacgactgccttccgattgccaaaaacgaatcgactgctgcgttggatttcgattcgtttggccgcttgcgaagtctcctctggccacctttccttggggtgttttctttggtacacccgtgtaccaatacctaagatgatacacctgtgtaccaatttgtcaaatcacccgacacgcctgatttttttcgccttttccatgctttccacgtgagcaaatctccagtcgaacagcgacttgtctcagaggctcttcatcccctcccccaacgtgagtaggtcccgactctcagcacaccaccaaataacgcgcagcatgctcgtgagtccccaacacccacacaccacggcgcgattccaccactcagccgcctcactagtgcccacatttgtagatattcaacgccatatgacaagaatctgactagtatgaacaggcaccccccatagctgtattgagaggaaaagcacatggcgggcctgtttcaagctacttccaagcagcgcaatcccttgggaacaaccatacgtactcacggatcgggcaaatatacgttcggtctggccttaagcgccggtcaatatccgcggtctgcttgccttttcctatcagctcctcgcggtatgcggcatcttcctgaccaatgtcatcaactacatcatcgcctcctacggtcccagaagctgggatgtcaacgccggttggcgttggatgctgaggctgggtgcgattccggccgccgcgttcccgctctccatggtgcgagcaccggaaagcccacgattcctcattcaagccggcaaaaccgaagagggattcgcggtgctcgagcacatcatcggcaccgaacaggcacgccttcgcactgacgacatccatgcatcggtcaaactcgaaaccgaaatgtcgcatgaatttcacgacctgttccgcccagaactgcagaaggcgctcatcatcggcactttgatcaaggcgtgaatgctgcgttgcgttactgcattgccatgttgccatgttgccgcgttattgcatcgctacgttgtcacgttgccacatcacattgcattgccgcattgctgcgttgccacgttgccacatcacattgcattgccgcattgctgcgttgccgcatcacatatcgcaacacaaacgcagcaacgcaatgacgaccggagatggcatcgccgccacccgcgaggaaccgcagtgcaacgcggtaacgtaacgcaatgcgatgtgattcccgcgtagttacaggcagttacagattgagtaccgcatcagcaatgcgcatggcggattcgcggtgggagaccagcaccacagccgcgccgcgctccttgtctgcatgctgctcacccacggccatagcgtgaatggaacgtagaataatagcctcgttcaaagcatccaaacggctggtcggctcgtcgaaaagcaccagatcagcattgcgcaggaacacacgagccaaaccgatacgctggcgttcaccttcggatagacggtcgcccaactcgcctacctgagtatcaaggccatcgggcagggaatcaatgagatcaagcacggaggccttggcgagagcctgacgcaaacgagcatcgagaccgtcagctgctgccacctgaacggcatcgccctctgccgattgcgccgccaactgctgctgtcgggaatcaacggtcttggcacccacttccccattgcctgcaacatttgcagcttcaacctcggactcaggcaaagcaatcagcagattgtctcggatagagccatcaaacaggtgggtttcctggctcatcatggcctgaatacgtcggcgagcatgcacatcgacctcgggcaacggcgtgccggacaacgtcacctgaccgcgctgcggatcccagtagcgcagcagcagcttgagcatggtggacttgcctcggccggacggcccctggatacccagcacgccatgctgcggcacgtcaagcgagaagtcggacaggacttcgcgctcccccgcatatgcaaaggtgacgtcatcaagacgcatgcccatatactcctgcggcacaacagtgccgttctcggtcacagcgggcacctcgtccatcagtccgaacagtcggctagcggacgcgaaggtctgagtcaggttagcgggcaaggcggcgagcgccaaagtcggtccgaacgagctggcgaacagcacgaaggcggcaatcagagccggaatgctctgcgggttcgcgccggcacaggcaatagccacggcgaccgaagccgctgcgagcacagccaccaagagtccgctgattccggtgaaacggccgttgaccttgctgagtttggcgtgatccttccacaacgcatgggtacggtcctcgatggcctgcgcacgttcctcgccgcggccaaatcggatgatttcgtccaggccgcgcatgtcatcgagcatcacatcgtcgagttctccggcagcgccacggatggcagggccaaggttacgtacgccggtggcaaagaatcgcggcacaaggatgccgataaccaggtgggcggcaatcaacgccagcgccatccatgggcttagggtggcggccacaatcgtgtagatgatggtggaggttaccgcgatggccaccggactgatggtgtgggcaaagaagatctcaagcagttccacatcggtggtcagcatggcgataaggttgcccttacctttgcccgcgagcttggccggcgccagtctgcgcaacgcggcgaacgccttggaacggaagagtgcgagcagatggaatgccacattgtggttcagatattgttcaatgtatcgggtgatgccacgcagaagagcgcagataatcatcatgatgacggcgggcgcaacacccatgccccacaccggattaccggtaagtgcaaatgccgcgataatgccgaacacgggcaggaaggtggacgaaagatggccgatggtgccggcggtggaggccactgccatcagtcctgccagcggtcgggcttccttaagcagtcgcctgatcacttggaatgtgctcattttggaagacgaatcgctatttgcaacaccagccggagtctcagccgaggcctgctcactcccgccaacggaagccgtcggcaaagctgactgcaggcggtcaaccgtcatacccgcctctgcgcttacgcgcgctgcgccaccctcagtccgactgtcgtcggacagctcctgcttgcgggaaccaacctgcagcacacgccgagcatggccttctccgaagttctcaatatctgcctgcgtggtaaacagcttggcgtagacgccgtccgccgtcatcagctcggtatgggtgcccctctcaaccgacttgccgtgttcgagcaccaccacttgatcagcgtgttcggcgttggccatgcgatgggtgatcataataaccgtcttgccgcgggattgcgccaattcgcgaattgtatccaggatcagctcttcggattccatgtcaacgctgctggtcgcctcatcgaacacaaataccggcgaatcatgcaggagcgcgcgggcgatggcgatgcgctggcgttggccgccggacagattggcggcatcggactcaatcggcatgcccagtccgttcggctgtgcgtgcacgaagtcggcaatgcgcgcctgctcgagcgcggaccacagacgggagtccacggaatccggcgaatcaggaatctcgtcatcgggcaaggccatcagaagattctcgcgcaatgcgcccgcaaacagatggctgctggcaccaatcacagtgacggctccggccagtgtttcgcctgacaaatcggatacctcgacgccgttcagcgtgagcgaacctcggtaaccggccagtgtaccggcgagcagcgaggcggccgtggacttgccggaaccggagatgccgacaatggcggtgaactgaccgggccgtgcggcgaaggtgatgttggtgagcgcaggagcgacggcggaattggggctggtttcaccttgcttatcggtctttgcggatgcggacttggagtcgccgtgcccggcatcatcataggaatagccgacgtggtcgaagcggaccgtcagaccgtcgtcagcggaatcggaatcgttggccggcagggtcgccgtgccatgctcgggctccggggtgtccaacagagcgaagatgcgcttggtggaggtcatgccgttcatcgccacgtggaagaacgagccaagctgacgcatgggaataaagaattcggcggacagcagcacaatgaacagcagaccggtaagagacagcgggtagcccaccccgaacgggatgagatagtgcagaccgtataccgcgtaggcaagcacaccaggcagatgtgaggccagtgcgattggcgaccagccggacgcaccattggcaaaagcatcgccaatatgcgcgtattgccataacgccacaccgatgccggccgcagcaccgccgtaggccactatgtccatggcggtcagcgagcgcagctggatctgcagcacgcgcatggtcatgatgcggaagccttcggctttcttgtccatctcgatggcggcgcgctcgtcggcgtcgaagtttttcagggtctcaaggccttggagattgtcgaggaacgcggcgcccatatcggtgtagcgcacccagtacttcttgaaggcgcgggcggcggtcatggagacgatgccggtcacgatgatgatgaacggcgcgcagaccagcatgacggcagcggcgggcacgttaatcggcgcaatggccacgaacaaggtgattggcgcaagaatcgcatagaagagctgcggcaggaacagttcaaagaagctttgaatctgttcaacaccttcgccggcggattgcaccacatccgaggtcttgatgcgggttttgtaggacgggccgagtgccaccattttgcggtacagcttggagcgcaaagcgagcttgactcgttcggcggcttcggtgccgagacgggtggcgtgcgtggtggccgtgtaatggaccgctatacagaccagcgcaagcagcacgtaaatcatgacgtcgccagccatgggcagcacatccgcgccgtgccgatcagacaacggcacggggcaggccgcgccttgcgaagtgccgccgcattggagcagcggcggtgccacagcggtcagtaagctgttcagcagcattaccagcgacagcataaaaccaatgttggcaagcagacctacccacatcagggccactttgccagctatgagttttttcaagccaggcgccaattggaacagtcgttcgtcgaacatggtccgcttccccttgccgtgttgttgcggtgtgccctcgtcatgtgtacctgcgctccacattccgcgcaatcccattcactttaagcgaacgccctcgcacacgccagacttttaaagtgagagaggccacagaattatcgattgcggagtgcgcatgctagacgcgccaaccagaaaaaatatgcttcgatatcaggggctgaagcatccactacacccaatacgtgcatttatccgtttcgaggaggctattttttgcgtttgccggaggcctacttccgtttcaaggggctgatttcgcatttgccggaagtctatctccgcttcgaggggctcctcatccatgtaatcggaagtataaacggctacacgtcaacgtcattccgccgttttagggccgtgtctacttgggcatcagcccctcgaagtggaagtagacttccagataaggcaaaatcagcccctcgaagccgagaaagcacgtttctacggtgtcagaagccgacggaacgcaaaagggtcgtctgcacgcagacgacccatatgatcaattcgccaatagacgcagcaaacgcggcctagtgctgctttttgcgcggcgaccagtgcttcggcggcggccgtacttatcggacaggaagccggagaagccggcgccgatcacgccgccgatgatgctggagctgatgaccggaccctgcagggccgggctcagcacgtacttgtcctgcaggaagtcgatggctcccgaaatggacacggtcataaccgtagagcaaaccggttagacacggcgttgtatacaatccacaaaaccagacagacaacttctccattgcccacaacgcgcgcaaccttacgccagcgtaatctaactcgtcagaatggctcgggttgtcaacttgccatcatgtttgtaaggaataaacggccgtatgcttaccgaatacaccacgcccggcgaatccatcgagatccgcgatgaccaaactatctattcactgctcaccgaacgactggcccgcaccggcgcggacacggtaatcgccgccaagaaaatcggccccggccgctggcagaacgtcaccaccggcgaattccacgagcgcgtggtctcagccgccaagggcctgatcgcgctcggcatcgccaagggcgacgcggtgaccatcttttcctccacccgtctcgaatggggcattctcgatttcgcactggccgcagtgggcgcggtaagcgtgccgatctacgacaccgactccgccccgcaagcccagcgcatcatgaacgattcggcggtcaagctggcctttgccgacaaccgcgagcgcttcgaccggctcgactcggtcaaggaccactgtcctgccttgaagcagattctcatgatcgagggcaacgcgctgggcgcgctcgaaggtctgggcgtggctgtttcggacgaggaactgaacgagcgcgtggccaccgtgcgcgccgacgatctggccaccatcgtctacacttcgggctccaccggcaacccgaagggtgccgaactgacccacaagaacttcgtgtccatcaccatctccgcctcgcaggcgttgcatgaagtggtgcttgacgaccatccgcgcctgctgctcttcctgccgctggcccactgcttcgcgcgattcatccagtacgcctccatcgcctccgatgacggcgtggtcggttatctgccggacaccaaaaccctgctgccggacctgcgttcgtttgaaccgacctacctgctgggcgtgccgcgcgtgttcgagaaggtatacaacgccgcctcgcacaaggccggtgccggctggaagggccgcctgtttgtcaaggccgccgaggccgcgcgcgtctggagccgcaaggagcaggccggcgagcagcacacgtttgccgaaatcgccgagcgcgccaagtacgaaacgctcgtctaccgcacggtgcgcggtgctctgggcccgaagatcaagtacgtggcctgcggcggcgcaccactgtcgctcgatctggcgcatttctacaacggcatcggactgccgatgattcagggttatggcatgaccgaaaccgccgccccgttcgccgccacgcgcgtgaccgacaatgtgatcggcaccgtaggccagcccgcgcccggctcctcgattcgcatttccgacgaaggcgaactgcaggtcaagggcccgaacgtgttccgcggctaccacaatctgccggagaagacggccgaggcgttcaccgccgacggctggctcaggaccggcgacttggccgagatcgatgatgagggccacatcgtcatcaccggccgcatcaaggacattattattactgccggcggcaagaacgtctcccccattccgctggaggaagagatcgccaagtgcccgatcgtggagcactgcgtggtggtgggcgaccagcgcccgttcatcggcgcgttggtgacgctcgatccggagtcgctggcattgtggctgcccgcgcacggcctgtccacggagacgccggtcgaccggctcgccacgaacgccgcggtgcgcgaggagattcagcagtacgtggacaaggcgaatgcgacggtctcgcgcgccgaatccgtacgcaagttcgccgtgctggacacgcagttcacgcaggagaacaagtgcctgacaccgtcgctgaaagtggtgcgcccggccgtcaatcgcgtgttcgccgatgtgatcgacaacgagatctacaacggcaagcggtgagacgcgcggttcgtaatccgacacaaaaaaagggccttttgaaccgcaccccgattgttggactggagtaatccagattcgatgatcggaggtgcggtttctcatgtccagggatcgcaggcgtcattatgacgatgattccatgcgggtcgtcgccggggtgccgcccggcccaggtgggtcatgcccgggtcagtttcttgctcctgagacgcagcacgacatcggcggagttggcgacgcgcttggaatgcgtcaccacgatcacgcatttgccgagctgatgggcggcgtgctgcagcagatgaatcacctcgtcggtcatctccgggtcgaggctgcccgtcggctcgtccgcgaggatcgcgcggcccggggcgaccagcgcgcggccgaccgccacccgttgacgctggccgcccgacaggtgcatgatgttgcgcttggattcctcacggctcaaacccagttcctcgaggatcttcatatcggccttggcgctgaccagccgcaggttctcttcgggggtgaggtagtcgatcaggttatggtcctggaacaccagggacacgtgctcccggcggtgcttcgcatagcccgatgcggcgatgtcctccccttcgaagcggaccactccccgggagggggcgtccaggccggccagcagcgacagcagcgtgctcttgccggcgccggacgggccggtgatcgcatacatcttcccggattcgaaatccgcgctgacatccgaaagaacacggatcttcgccgcgccgtaggcgtaatcgacatggtccagttgcagacagttagacatgattggtgactcctaacgcatagaggaaagaatggatttcggggatttggacagcacggcggcgcatgacacggcaagagccacggcgatgaccgcgcatccgagcagcaggatgagcatcgtctgctcaggcggcaaggcctccacgtgcaacgattccaacggcgcgacgcccgaatcgcgcaacagtcgggaagacacgtatcccgacagcatggcgccggtgcccagcgaacacagggcggcgaccgccgccatgagtccggtttcgatggcgagttgtgcgacgatccgcatcttgtcgatgccgagggccagaagcgtgcctatctcatggatgcgtgagcgaatccagaagaccagcgccatcgccagcaccagtacgtccgcgaggcagacggacagcagcaccatgcgcaccagattacgcaccgtctgcacggattgcaggacgccggagagccgggccgaatcgtcggtgacgtcgtacttgccgccggccatggtcttggcccgtccaatagccgcggacaggtcctgcggattatccgacaggcatcggatcatgtcgatccggtcgtttccggtcagagcggaagctactcgcctacccgaatagatgaggttctcggaagtgtccgagggcagggggctttgggcctgcacgttgccggagaagatcccggccacacgcaccgtggcgttgcgcccctcctgccggagacggaatgtcgagccgaccgataggccgttctgcatcgcgaagtcgcggtggaccagcacattgtcgccgtcgcccgagatatggcggccctgctccaggcggtacaggccgctctggaattcctcggacaatgaggaatcggtggtgcccagcacgctgacctgcatggccagatcggagtccaatcgggggccctgccggggcatgaccgggcgcgcgccatccacctgcgccaaggtcttcgtcgcataggcggtcttcgtcacaccggggatacgcgagaaccggctcgcctcctcggcgctaatgggattctcgccggcgctgacggtaaaccctatgcccatgcccgcgccgatgccgtcggacatggtacgcagggccgtcgagactccgacctgcgccaccaggctcgtgaagaccatcagcatcagcagaccgatgatgccgctacgtaccggcttgcgtacgatcgccaacgtggcacgcttccacacattcatgctcatcatcgaatctccgacaggtctcgcggcgatttgcgcagcatcggcatgcacgccaccgcgacgcacaccagcatcaccgccaacaatccgagcgccacgtacagcatggcggtcccgtcgaccgacaccgtgagcgaatccagggtgcgcaccgacatgctggattcaagatcgccgccgacctgccccatgctgctcagctccttcgccgcggaggcgttcacggaatggagcgccgtggcgccgagccattgggccattccctgcgcgcacagccagccgagggcgagggacggcagaccgatcagcaccatctcggtgaggtattgggcgaccagggagggcttgccgacgccaagggacaccagtatgcccatctcttgacggcggtcgttcatccacagcagcagcatgagactgagcacgagcacggccgagacggtcacgccgatcagggcgccgcgcatcatggagcgcacgccgcgggcggcatgcagcatgctcgatgaatactggtcgttgcgcgtgatctgatagttgttccaatccaccgggagtttcttcgcggcatccatggtcttctccacgtcaacgcccttggacagcacgaaggtggcgtcctggtatatttccttgccgtccttgtactggtacaggtcgcgtgtggtatccagatcggtgtagatggtgttggcggtgagttccgctcggctggatacctttctggcgctgtcgcccttgaatatgcccacgatggtggtcttgacggtcgccgtcgaatgtgattcgttgtcggcgtcataggcgttggccttgagcgtgagcgtgtctccgactttgagcccgttggctttggcgagatcctcatggatcatcgacgtgtacttgtcggaggccttcagatgtcgtccttcggccatgccgagcgtgcgcgacgtgaacacgttgagtttcgacgaatcattcgtgcccatgacgttggcggcgttgccgaactgctgctccttggtcgcatcgtaatcatcgccgccggggaccttcgccacattcgcccccacgagatcggcggtggcgttctgacggaccatatacgaatcgaccccgggcagttgggcgatcctgcgcacgtcggcggggcgcaccatgccgcctccgcgaggcgtgagcatgctgccctgcatgttgctggacagcacgaatccaccgaccgcttccttctcgattcgtccggcggcctgttgagctgcccgagaaaccgcgatcgtggatagcatgctcgccgttatgatggtcagtattataaggagtactatggttcgcactcgttttctgagcacatagcgcaccgaccgtgcaacgaacgtcatcaatacctcctgtgggacttgggcttttcgcccaaaatgcgaaacatgccgcgtttcgccgattagttagccgcgacgatacatgatgcacctcaagatacgggagatatacgccttgagcgaaaaacggaacagcggcgaatgtcggttattctggattttggtccatctcgggccgcgtcgatgcgtcggcccgcgagaaatcaggctcgcgcctcaccttcgaggcggcgaacacaagaagcggcagagcggcgaacgcatagttctcgcattggatgtacaggtatgcgactaggacgagccagcagatgacggtcttgtgccagacgccggattcgcccgaacccgcgccggcaacgccaccaccactattacccccggcaacatcagcaacgtcggcaacgtcggcgacacaaacaccgtgcgccagctcgtcggacgatgcgccatccgcaccgccacggcataccgtcctcccgcgcgtcatgcagaccatcgaggctccgaccagcatggccagcccgatcagcccgtattcggcgatgacgctggtatacgcgcacatcgtccacaccgtgtccgcgttcacgccggccgcgaatcccgtggccgcgccgccgttcatgccaagaccgtccagcagccgtccggctttggccgcgccggcccacaccgcattgatgatgttgcccgcgccataaccggtgagcagcgtccacggatgggtgagcaatccgcatatcggatcgaggctttggtagatccgcgcgaagaacgagccgtctccctcggccccgttttccgcgatggcggagagtctggaatccgccagcacacccagcaggcccagtgcgcatgcgccgagaatctgcagcatgccccggacgcggcgtgcgccgtcatgccaatcggtgcgcgccacaagggcgatcagcaacgccacgacggaatcgatgacgattctggtgccggcttgcatgagcaccgcgccgacggcatacgtgacgatgaggtcacgcagccgtttggcgtagatgcggtcgcgcccgcgcatgagccacatgagcggaagcagtatgccgaacaggtgcatgccgatatagctgggctcggcgaacaggaactgcggacggccgccgccccacaccgagttgtcgctgatgtattgccggtacatgaggtgcgagaaatagtcggtcaacggtttggcgtgcagacggatggacagccattgcacgacgcccactccgaaggaaacccagtatgatgcgatgagaatccgcaatggcgtacgccacggaatgcgtttgatgtcgaacgcaagggcgatcgcacccaaagtggcgagcacgcccagcaatccggtgatgctcatgaacgcggcgttgaggtggatgccgaacttcagccatcccgggatggacaggattatgcaggccaccggtaggaggaacattggcaggtaccggttggctgcgatgcgcagttgccgccaattgcataggcagtacacggcgaacagcgccggactgattggagaccagaacggcgcgtacaggccaagcgtggtgccgtccaccggaagaaaagcaatggccagcaacagccaaatgacgttgcgttcctgcgatgtcagaaatcgcaggaacgaccggtattgcggtcggccatgatggttgcccgcgtcgatggtgtcgttgcgtacgcatgcctggttcatgtgattctccctccccgtcaaccttactcgttcatcatgatgcgcggacggggcatgctttccccgctgaaagtgcaatggcccgaacattgacaaggtcgcaccgaatgccccccatcattggcacattgtgcgatctcgtcgcggctggctgacgaaataatgttggccgaccggttacattggttcggtacagtggcggcattattggccactgaatcaagcgatttgcggcagaacgacgaaaacaacacttgggcgaaaagaggcaggcatgactacgaatcgaccgctcattgcggtgactccgctgatggattacgggcgcgatagtctgtggatgctgcccggatatatggaggcgataatgcgggccggcggtacgcccgtcatgttgccgctgaccgatgacaccgacattcttgcgcaatgcgccgaacggtttgacgcgtttctgtttacgggcgggccggatgtgggaccgatggttggtgcagcggcctccgccaccggccgtagcgaggtgctctctcctgagcgcgaccgaatggaatcgattctgctgccagctgtaatggcttgggacaagccgattctgggcatctgccgtggcattcagttcatcaacgcagcgctgcgcggcacgttgtggcaggatctgccaagccagcatccgagcgatatcgaacaccatatgaatccgccgtacgatgcgttcggacataacgtttccttggtgcccggcactcccctggcttcattgttcgcagggcagactgagattgcggtgaatagctatcaccatcaggcggttcgtgagcctgctgctggactcgaggtcatggccgtcgcgcccgacggcgtgatcgaggccctgtaccggccggcaagccacttcctgtgggccgtgcagtggcatcccgagtttctctacaaggtagatccacgctcgcaggcgatttttgatgcgtttgtggggagttgccgataacagcaaaaggggctgctccggtttcccggaacagccccttttcagcggtagcagtcagcagactgatttagtcatcagtgctggcttgccagcgctgattggcgcgtgcggagaccgccgtccgaaggcgaaggcgtacgaaggtacgtcgaacctgaggaaaggcggtatacgctccgccaatcagtgctggttgttgagacggtggtacatctcggacagctccagttccttctcgaactggcgagcggtggtgttctcgtcgatgacggcgagctcaacaccggcgatgcgggcgaagtcttcccaagcctcacgaccaacggaggtggtcatgcaggtgtggtgagaaccaccggcggtgatccagcactcaacagcggtcttcaggctcggcttcggctcccagacggcgcgggcgcacggaagctccttgagggagccctgcggctcaacgacgtcgacgacgtccatgagcaggcggaagcgttcgcgaacgtcggacatggagaccacgacggcgtccttggcgggcttgccggagaagaccaggcggaccgggtcggccttgccgccgatgcccagcgggtggatctccagcttcggcttggcgatggtgccgatggacggggaaacctcgagcatgtgggagcccatgtcgagctcgtcaccctcggtgaagttgtaggagtagtcctccatgagggaggcgccaccctcaaggccgtagcccatgacggcaccgatgcgcacgaggacggcggtcttccagtcgccttcagcggagaagccccagccgtactcggacgggaagcgctgcgggccaacgcccggcagctgcggcagagcgccgaggtcctcgaagttgtcgacgccggcggtgcagccgttggcgcgcatcatgttgaccatcgcggcctcttccttggcggcgatgaacagggagtcgtacttggcgtccagcagagccgggtcgacgtcgtacttggccttgtagtcctcgatgatctccttgacctggtcgtccttgacggcgtcgtacgcagcgacgagctcgttgacggcccaagtgttgatggaggcgccgaacacgcgctcagcctcggtcttgtcgccctcggtgacggcgacgttacgcatgttgtcgccccagcgcatgaccttcatgttgttggaggcatcccagccggcgcaggcgcgggcccaggtgccgagcttctcggcgacctcgggatcggtgtagtggccgacgacaaccttgcgcttgatgccgaggcgggagacgatgtaaccgaactcacggtcgccgtgggcggcctggttcaggttcatgaagtccatgtcgatggtctcccacgggatttccttgtggtgctgggtggccagctgcagcagcggcttggtcagcacttcgaggccgcgaatccacatcttggccggggagaaggtgtggcaccaggtgatgacgccgatgacgttcgggttggcggaagcctcgaccatgaactccttgacaccgtcggaggacttcagggtgggcttgaggacgatcttggccggaatcttgccggtgttgttcaggtagtcgaccatttcagcggagtgaatggcgacctggcgcagggcttcttcgccgtacaggtcctgcgaaccaacgccgaaccagatttccttgccctcgaaggggttttccataaccatagggttacttcctttacttctttgtttatgggggtttgtttaagtttcattcgccgaccgaggctcccctcagtcagctatcgctgacagctcccctcagagaggggagccaagacaccaccgtgctggcggagtcagcgctgatttgatgtgtgtgtccgcaaggcgcggaaggcgaaggcgtacgaaggtacgtcgggccttccgtaacgcggcggacactccatcaaatcagtgctgaccgtagacgttctggtagcggtcgttgagcttatcgatgtcggcctggtcgatctcgatgatgtcaccgagctgacgggcggcccacatggtgtgagcgacttcctcggtcatggcagcggccttgacggcgccttcagcatccttgccgatggtgaaggggccatggttctgcatgaggacggccggggacttcgggtacttcttgagggtctcgacgacacccttgccgatcgcctcggagccgatcagacggaacgggccgaccggcaccgggccgccgaactcgtcacccatcatcgtcaggccgcacgggatgttctgaccagtggcagcccaagcggtggcgtaggtggagtgggtgtgcacgacaccgtagacgtcgggcatgttgcggtagatgtaggcgtgggaagcggtgtccgaggacggggcttcggtgccgtcgaccacgttgccgtcaaggtcgcacacgaccatggaggacggggtcaggtactcgtagcgcaggccggagggcttgatgacgaacaggtcggcggtgtgcagacgctgggaaacgttgcccgcggtccacacgaccaggttccacttgattagctgctggtgcaggttggagacgacctcacgaacctgcttgacctcggcgcgaacctcggggccgtaatcagccaaagttgccattattggttttcctttccactgtgatggatggacgttttttcaaaatctcaaggacctccctcaatagagggaggtcagaaaggcttacttatcttcgaggttgatggtttcgatggcggcgtgctcgatgggcaggcccttggtgaagcgggcgaagaagtcctcgaaaccaaccacatcggaagccaccggcttctcagtggtggactgggcgtccttgaacacgcaaccgtcaaggaagtcagcgaggttgctgtgatcctcgttggtgttccacaggtagttggcgagcacggccatgccccaggcgccaccttcggcggcggtggacatgaccttgatcggggtgttgaaggcagcagcgagaatcttctgagccaccttcggagtagcgaagatgccgccgtggcccacgagagagtcgacctgcacgcgctcctgcttggtcatcacgtccatgccgatcttgaccggggagaacgcggagaacagctgggcgcgcatgaagttgccgagggtcatgttggcttcggggctgcgggcgaacagcgggcgaccttcaggcagaccggccaggaattcgccggaacggaacgggtagttcagcaggccgccgcagttggcgtccacgtcgtcggcgatggccgcgcggaacagggtgccgtacagcatacctgcgtcaaccggctggccgatagccttggcgaactggccgaacaggccgacccaagcgttgaggtcggaggtgaagttgttggcgtggctcataccggccagatcgccggccggggtggtgaccaagtcaacctcagggtggagggccttgagcttgtgctccagaaccaccatggcgaagatggaggtgccggcggagacgttaccagtgcgtacgcgcacggagttggtggctaccatgccagtaccggcgtcgccctcaggcggggcgagcacgatgccgggcttcagggcgccggacggatcgagcagcttggcgccttcctcggtcagctcgccagccggagtgccggccacaagcggctcaggaagcaggttctccagcttccacggctgggctgcgacctcaggtagagcgtcgaacttctcaatgaatgcggtttcgtaagtgtgagtggtcgggtcaatcgggaacatgccggaggcatcgcccacgccgaggaccttcttaccggtgagcttccagtgcacgtaaccggcgagtgtggtgaagtaagccaccttggagacgtgctcttccttgttgagcacggcctggtacaggtgagcgatggaccaacgctcggggatgttgtactggaacagctcggagagcttcttgtgagcttcggaggtgttggtgttctgccaggtgcggaacggcaccagcagttcgccggcctcgtcgaatgcgaggtaaccgtgcatcatggcggagaagccgatgtggccgacgtgcgtgagcttctcgccataggcggtctcgacgtcgttggccatggaggcgtaagcggactgcaaaccgccccagatctcctcggtggtgtagctccacagaccatcctccaagtgagaggcccagctgtagtcgccggaggcgatggtctggaagttgtcgtcgatgaggacggccttgatgcgggtggagccgaattcgatgcccagcgtggtcttgccagcgcgaatcttctcggcgatgtgggcgacctgctcggccgcgttgtcggttgctgccatatctttcctttgccttggagcgccggcgttgttatccccttccttggggagggtgttagcgctcacaatttccaaaaaacattgtaccgacaacccgcattcgacacaacttatgccgtgtcacgcatcataacggtttgataacagggccaatttaccgccgaggagccggccccaaggaccgccgagcacgcacctcggcgggaatcagccccatgccgtgctgggtggtcaggaaggtcggctcgccgccctcccccagcaagcgcagcgtctctcgcatggcggccacgccgagcccctcgaaatcgggatgcacggtggtcagcggtgggtacatgttatccacgccagacatgtcgtcgaatccgaccacgctgatgtcttgcggaatccgaagcccatgctcatgcaacgcgcgcatgatgccgacggcctgattgtcgttcgcggcgacgaccgcggtgggcaacgccgcgcctcgacgcccatactcatcaatgagatgattcatgtgcgcatatgcctcagaggcatcccacgtatggcagcgcacgatctgtgaatcgatggatcgggaggcggcgagcttgcgccacgcatccagtcgggtgtgggcgtcgcgccattcgttgggaccggcaaaatacagagccgatttgtgcccgtattcgcccagcaaggccaccactttggccattgcaccccactggtcgataccgaccagcgcagtgcgacgcttgttttcggtggagataaggcccaatccctcacgcacggtcatttggccgtgggtggcggtgacgatgacgcgcggctgagtgactcgtgcacggcaggcggcggcgaacatcacgtcggtcggggtcaggaagatgaaggcgtcgacgttctgctcgttgaaggtgtcgcacaggttgtcgaagtcggcctgcgcgcacaaggcctcgtggaccatcatcacgctcatgaacagaccgtgctcgcgggccatggattcgatggaggagatggaggaaatcgggccgaagaatttgaggcctccggcgatcagccctatggtgcgcgaacggcgggaagccagtgcgcgcgcggagttggaggggcggtagccgagttggtcaatggcggcctggactcgcgcacgggtggcgtcggaaacgtccggcgagtcattgatcacacgggagacggtttggtggctgactccggcgagcttggccacttcgaacatggacggacgtttgcttggcttgcggctggtcaccatattgcctaacctccccgctggcggccggcatccatgcacggccagtcttgtaccttaatcaatactgactttagcgcgtccacaacagttttgcgttagcgctcacactgtcgtgtcgcacgcggctcaggtcaggtgccatgagacacgatggagcggagtcggcccgtgctcggcgatggcggtacggtgtgcggcggaaccatagcccttgttatgagcccattcgtaggcggcgtaacgtgggttgctttgcgcgaggtcgaccatcagccggtctcgggtcactttggcgatgaccgccgcggtggcgacggtggcgcaatgctggtcgcctttgactttggtcgttatgtcggctggaatcggcacgtccggcgcgtcgaacgtgttgagcgccttggtgatgtaatcgctcggcccgtcgagaattccggcgactttgggcagagcgcgaacgcttccctcgcaatttccaatggattcccctacggagcctcccggacgaccttccacaatcttccccgcagactcccccgaagccttttttatcgtcgattcccctccaagtcgtaagccaagttcgcgttcgacttggctgagcgcgcgcagggcggccacgccaagcgcgtaggtgatgccccattcgtcgatctcggtgttgctggcctggcctacggcgtaggccgcgcaccagtcgcgcagttcgtcgaaaatcgcctcgcgcctatgttcggtgagcattttggagtcggccacgccgtccggcacgccgaggtaggtccgcccggacagttcgacggcatcatcgccattcaacggctccaaatcacgggcccaaatggcggcgcacccgaccatcaccgggccggcgagcgcgccgcggccgacttcatcgaatccagcgataaggtcatagccctgggccgcaaggctgcgttccaagtcaagtgtcggggtaatcatgcgcggctcccatcgtctcacaatggttaggattcagacggtccaggattcatatggttcagggttcagacggcccggaactcaatcagttcaaagactcacacggttcaaaaaaagactcaggaattcgagccggaagcgtcaggcacgtccttgaagacttcgtggtggtcatcaatcgcaccaagccggtcaagcggccagtatttcgcgattccgactccgaccacatcggagatgggaaccaagccgcgatcgccgtcatcctgatgatagcgggagtcggcggaattggcgcgattgtcgcccatgacgaacacgcggccctcggtcacggtcaccgagaacgggaaggcgctcgggtccacgccggggcgaatgtaggaggtctcattgatggccacgccgttgatggtcaccggctggcccgcgcccttgcattcgaccacgtcaccgggcaggccgatcagtcgcttgatgaggtacccgccaccgggagcgctgctctgctcctcgttcaaccagttgttgggatctttgaataccacgacgtcgccgcgctgcaaatcgaagatcttgggggtgagcttgctggtcaccacgcgatcgccgggcaccatggtgtccatcatcgagcgcgaaggaatctcgtaaaagccgacggcgaaaatgcgaatcagcagcacgataagcacgggaacgccgcaccacaggaaaaagtcgcgtagggtgaagtggtcatcatctgacgatgatgctgccgcggcattcgcgccagcggctgcacccgcgccagcggaagaagcggcgtgtgccgggcgcgccggtgccgggggaaccggggacagggcgatgccgtggtcggcgacttggaacgtgcgggaatcgcgggcatcggcctcgtcatcatacgaggtctggttgctctccggattgtcggaaaccgggaattcgccgttatcctgatcgtcctgcataccatctcctcgcgattcatgctgccggatatgaggggtgccggcgcccgtccatcatacgtggaaaatacgaaaacagcccgaaaccgaaacggttccgggctgaatttcacggtttattcgcgcgcctgcatcatcaggctcacgattgcacccgcgaatcgactcacttagcggagttgtcgcggcgctcggcaatacgagcggccttaccgcgcagagcgcgcaggtagtacagcttggcgcggcgcacacggcccttacgcacgagcttgatggaggcgatggacggggagtgcaccgggaagcgacgctccacaccagtgccgaagctgatcttgcggaccacgaaggtctcacgcacgccagcgcccttacgagcgatcaccacgccggtgaaggtctggatacgggagttgttgccttcctggatcttcacgttcacgtcgacggtgtcgccgggacggaaggccgggatttcctcggccggcttcatgtgcttggcgtcaaaagcctcaacagcgttaaccattgttttccttcagtgctgccgcatatcagccacagatctggggccatccacgcgattgcgcatcgcgcgcgttggcctgttctcgttatccctcgagtttgcccttgggaagcctgccgatccgccgaaagtcaggccttgcggccgttcggactggacccatggagacgtgggcttatgcggcggcccacttctcgacacagcaatcgaccattttacggattattgcggacagtatcggcgtgtcgtcgtctctctccgttattaacgcatcagtttggccgaggcagcacggatggcggattcgaatactttccgtccctcctgctggtcgcatggataccgacgatggtattgatttggcgtttcagcgcacggcttgaagaaggtgagagtccgatggacggtgattattccagtagtcccgccgccggcaacagtcatagttgagggggagcatacggagcgttccataactccctctcagtcagcttcgctgacagctcccctcagtattgaggggagctagaaaaacgaatcagaattcgcgacgtgggcagtcgccagactgcccaccagacagcacagccgcggtcgcgcgaatcacgaattctgaccgagcaaagcgaatcagaattcgcgacgtgggcagtcgccagactgcccaccagacagcacagccgcggtcgcgcgaatcacgaattctgaccgagcaaagcgaatcagaattcgcgatttgcgcggtagaacttgatcaggctctgggtggaggcgtcctgggcggcgagggcgtcgtcgtcctgggagatggccggggtgatctgcttggcaagctgcttgccgagctcgacgccccactggtcgtaggagtcgaggccccagacggtgccttccacgaaggtgatgtgctcgtacagggcgatgagctcgccgagtgcgaacggggtcagagccacaccgaagatggaggtggtcggacggttgccggagaacacgcgggccggaacgatctcttccggagtaccctcggcgcgaacctcgtcagcggtcttgccgaatgccagagccttggtctgagcgaagtagttgcccaggaacagctcgtgcacgtcctggtcgccgtccttggtcgggttcggggtgttgacgaacgcgatgaagtcggccgggatgagctgggtgccctggtgaatcagctggtagaaggcgtgctggccgttggtgcccggctcgccccagaagatctcgccggtctcggaggtgacgggggtgccgtcccaacgcacggacttgccgttggattccatggtcagctgctgcaggtaggccgggaagcggtgcaggtactggtcgtacggcagcacggcgtgggaggcgaccttgaagaagttgcggtaccagacgttcagcataccgagcagcaccacgacgttcttctcgaacggggtgttggcgaagtattcgtcgatctcgtggaagccgtgcaggaactcctcgaagcgggccgggccgaagacgacggccagagaggtgccgacggcggagtcgacggagtaacggccgccgacccagttccagaagccgaacgcgttgttcgggtcgatgccgaattcggcgaccttctccaggttggtggagacggcgacgaagtgcttcttgatggcttcggcgttcttctcgtcggagccgtcgatggcgcccttggccttgagctcttcgagcagccaggtgcgggcttcacgggcgttggtcagggtctccagggtggtgaaggtcttggacacgatgatgaacagggtggtctccggatcgaggcccttggtcttctcggccaggtcgttggggtcgatgttggagatgtagcgggcggagatgcccgcgtcggcgtacggcttgagggcctcgtacaccatgacgggacccaggtcggagccgccgatgccgatgttgaccacggtttcgatcttcttgccggtcacaccggtccactcgccggaacggaccttgtcggcgaaggcgtagatgcggtcgagcacctcgcgcacgtccttgacggtgtcctgaccgtcaacgatgtacttgccctcgtcttcgaccgggcggcgcagcgcggtgtgcagcacggcgcggtcttcggtgttgttgatgtgcacgccggtgtacatagccttggtgcgctcatcgagcttgacggccttggcaaggttggcgaacagctggagggtttccggcttgatcaggttcttggacagatcgaagtgcaggtcgccggcgtcgaaggacagcttctcgacgcgctcggcgtcctcggcgaaccacttcttgaggctcacgccttcggcctggagctcgtcatagtgcttctgcagggcagcccactcaggggtctgggtggcgtcaacgggcggattgatggccataggattccattcctttcatcagtgactggagcgccttcgctcacggctcggatgcgctccgtatcaccaaacagaatactcacaaattcggacatgaacagaacaaaaatcagtcagcgatgtcggattgccatcgtttgcattatcgaacagttcatggcgcggcacaaccgtcatcttcaaccgagcggtcacgacacaactgccaagccgccgattggacttttcgcggagatgtcttatacttaatttcttgtgcgcggctggcgaaatgccttccgcgaaccaagccactttagctcagtcggtagagcggctcactcgtaatgagcaggtcgtcagttcgattctgacaagtggctcggatgccctaggctggctggtctgtaatggctgtccggcctagggttttgcatatcttccacacctgtggaaacgcggatatgcacgcgcgagtggcggaattggtagacgcgcaggatttaggttcctgtgtctttgacgtgtgggttcaagtcccatctcgcgcaccggcttgagcctcctggaaacattggatcgccaacgattccgggaggctcttcgtatatgcgtgaggcaattgcaagcccttgcggacgcctctacatatggcaatgccaaggcggcaaatataatggtcacagcattgtgggtctgagcctgtgcgccatgagcctgtgtgagccaaggagagaagtgtatgtccgccattcttacgccggttggcctattgctgatcattctcgccggctatctgttcaagcggttcggcctgttcgggcagaaggattatcgcgtgttgcaaaccgcggaattcaacatcgtgctacccggtgccatcgtatactcgttcgccgccaatccgcatgacatctcgctgctgcttatttcggtattcgcattcctgtttgcttttatcccgatcgtgttcatctttctggccacccgcaagcgcaatgtgaccgaccgcgccttcctgatgctcaatggcgccggcttcaatctcggctgtttctctttcccggtcgtccagtcattctggggtgcgggcgcggtggtgccggctgcgatgttcgatatcggcaactgcgtgatggtggccgccggcaccaatgtgctcacccagcaactgctgcatattcagcccggcaaaacacttgccgaacaacacgccggttcggttcccaccttgccgtacgaaaagcccaaggatcgcgacgccaaacggcttgcccgccgcgcattgctgcgcaccatcggcaagagcttcttcggctcggtgccgttcgacacgtatctgctcatgatcgcgttgaccgtcgccaacgtgaagattcccgattggatcgcctctataacccagccgttgagcggtgccaacgcgctggtgtcgatgctgatggtgggcatgctcatggatttgccccaatccaagcatgacgtgaaggaagtcatggccgtcatcgcttggcgtataccgttcagcgtcgccttcgcgttgatctcgtggttcctgctgccgttctcggcttcgattcgcgccgtgatggtgatctgcgcgttggctccaatcgccattttctccacgctgttcaccgacaaagtactcggcaacgccaaactggccggcttctcgctggcaatcaccgcgatgatttcactggtgatgatggcatttgctcacgcgctgatgggcgtgtgagcaaatgcgcgagtaggcacacgacgggcgcacggcgggcacacggtcaggcgagacgcagcccacataggttcgtcccccggccgccagctgctaccggtgcagcagcttgtgcgccagattgctcacgccgaagcggaacttgtccaccggcaacgtgaatttgcctaccatctgctcgacgtagccgttgaagccctgcttgaattccagcacgccgcggccctcgtcgttcggatcgtcgaacacgccggaaatgccgtagaagttgtagcggctcacaccctgttccacacacaggtgcagcatcgcttcgtactgaatcagcgccgaggcgtagaacggcttgtactcctccaacgaaccggaatactgatagaccacctcattggggtgactgacgaacattgaagccgctgccggcagcacatcgcccttcctggcatatccctccacctcagccagacgcttgtcggcggccgcgagattgcgcgattcctcccccagctgacgttcgatgcgcgtggtcggacgttcatcgtatttcgcctgcaatcgagctaccttggcctgcaaggcctcgcgcttggcggtcatatccgccacatattcggcgatgtggatttccgcgagcatgaaatgcgcatctgcgccatacgcctgcttgaactggcggaaatagtccgcgccgcgcgtcgcgaacccgcggcgttcaccggtccgccgttcgatatcggcgaacacgtcgaactcgtcggggccgatttcgcgaacgtgcacgcccatcgactgcgcccgcttgacgctccattgagcgcgtttgccgaatgatgccagcagttccttgccgttggtgatgccggtgagatccttgacgtacatccactggcagaccacgtcataaccggtatggaatccgccatgcgtccagccggcatcggcgaatccggtcagcagtgcatcgttcggctcgccgtcgggctgcccgtccgaggaatacagacggtaggcgacgttaggccagcatgccacggaaacagcatggtggcgacgggccgattcacgaatcgcctcggttatggcccgcagcagagccggatcatcgctaatgccgatggggccgaaatatacggagccatctgcaccgaaacgaccattgaggtacagaatcacgcagccggttaccagattgccggatgcgtcgcacacgccaacgcattcggcttcatgcccacgaatcttggcaagacggacctgcccggaccattgctggaagctgccctggcttgtggcttcggaaagccggtcgagctcttcgggcgtaatcacgccaaacgtatacgtcgtatctgttcgattcgcagtcgcgctcatctcgtcgtcacctgtgccttatttctgtgtccgtgctcgccactgtttgtcagcgatgcagcagcttgtgcgctgcttcggatacaccgaagcgcagtccgtccaccggcagcgtgaacttgcccggaagctcttccacgaatccgccgaagcgagtcttgaactgccagacgccgtaggaaggatcgttggcgtcgaaaataccggaaatgccgtagaagttgaagcgctccacgccacgggcgatgcagtcaagcatcgcctcgaagtggattagggaagacgggtagtaatccatgaaacgatcgtcctcgccgctggacaggcagacgacctcgttcggatgccagaagtagacgccggcttccaccggaatgaccgggccgtccgaggcgatgatgccattgacttcgccgatggtcttttccagcgccgcaatcttcttgtctgcggtggcgatgcgcttttccagcgttgccgggtcggaagcacccttcttggccgtgccttccggctgctgttgcgcgcgctggagcaggcgttcgaggttgcgcttgtctttggaggccgcattcagcttggattgcagggtgtccagatattcgtcgaaatgggtttcgaccaccttgaactcgatcaggtcgccgaaggtatcgaacagacgctcatagtaggccagatcgcggctcttgaagccttgacgtgcggcgctcatatcgcacagcttgacgaaagtgctcagttcgccgcgttccagtcggcgcacgcgcagaccggaatcctgggcaatgcggatgttcttacggcggtacttggagaacgaggccagcagttccttctcattatgaatgccgtcaagccccttgacgaagttccagcggttcaccacggattcgtagcccacggtgaaaccgccatgtttccaaccgaagcgggccatgttgtccatcatcgtggtgtccgggtcgctggtcggcttgccgtccagatcatgcagacggtagactgcggccggccagcaggatacgctgatggcgtgatgggccttggccgaacgacgcagggctccggtcatcgcctcaaccacctgtggattgtcataatcgcacagcggtccgcaccagaccgagccttccaaaccgaaacgggactgcgtgtacaccacgtagcaggcggcaatcagcttgtcaccgcgcttgacacccacatagtccaccggaccgttgaacgcacccatggcggccatctgcgaggtctgctggaaactaccttgcacttgagctgcggagaacgcatccagctcggcaggagtgatcttggtaggggtgagcgaggcgacgcctgcatcggattgcgtcataatcgaaccttcttacttgtcgttactctgatcgttactctgggctctggaacggcctgtgtgctgcgtccgtttaccgcgacagcagcttgtgcgcaaattgcttcatggcataggcgaccggtttgaccggcagcacgaactcgcccggaagttcctcgacatatccgttgaagccctgcttgaactccagtacaccacgcccctcgtcatcgggatcatcaaagacgccgtcgatgccgtagaagttgtagcgagacagcccgtgttccacgcagaaatgcagcatcgcgtcatgctgaatcagcgcggaggcgtagaagggcttgtactgctcgacgctaccggagaacaggtagatgacctcgcgcggatgctccacgaatagtgatgccgcagccggcagcacatccccgtctttggcgaactcggccgcctcgttcaggcgcttttcggctgccgccagattgcgggtctcctcccccagctgacgttcggttttggtggtggggtgttcggcgtttttggcggtcaatgccgccaccttggccgaaagcgcttcacgcttggccgtcatgtccgctacatattcgtcgatgtggatctcggcaaccataaaatgcgctttgctgccaaacgcttccttgaaacggtggaaatatgcttcgccacggtattcgaagctacgacgttcagcggtttgctgctcgattcgtgcgaatacccccaactcgtcgtccgacagctcacgcacatgcacacccatcgattgggcacgcttcacgctccactgggtgcgcttgtcataggacttcagcagacttttctcatcggtaatgccggtcagatccttgaggtagcgccaacgtggaaccgccgtgtagcccacggtgaaaccgccatgagtgaagccgatcgcctcgagccgttctatcagcttattgtcgggagcgccattctggtcatccggcaaagaagctccattggtgtcgcgaagccgatacggggattcaggggtgatttccagctgtgaagcaccctttgccttggcatggcgtttcagcgcatccatgaagaaggtcaatgcttcggtgtcgtgatagtcgcacatcgggccatcatggatgaccgcaaatgtagagaatcgagagcggtgagtttcgaacagtgccgccgcgacgatcttctcgccctccttgagggccaaatattcgacgtcgatcccctgcgcggcgcgaaggcgtcccatcgccgaggtttgttggaaattgccttgtggatgcctggcggagaaatcatcgaactcctcgtctgtcaacttcaccagcacaaaatcacgcatgcttccctttgcctccgagtcaatcaggctcaccatgctagcatagcgcgcacacgacgaatggcggccgagcagatgaggtgtgcacatcgttcgcactattgccgccacgatggtccaaagaacaatggcccaaagatgatgaatgtccggcttgcagtgaatcaaacgcagtgctatattctctacttggctcttgaagccacgccaccttagctcagtggtagagcatccccctcgttcgtgggaaggtcggtagttcgattctatcgggtggctcttgttcatcaagaaggccgacgcactaagcgccggccttctttcgtatcgcccttgctaggtcataggcgcttgctagacactcgcccgattcgggggctgagtgctgagccgcgactcaactgtggcttagtcgcggctcagtgcagctagacagcctagacgacttagtgcagcagggcctcgatggcggggaccaaggctttcagcgccttgcctcggtgggaaatcgcattcttctcggccggagtcatttcggcgctggtcagcggctcgccttcatggtcaggctcagtgctgacgcgaccggcaggctgatcgtccgggacgaacagcggatcgtaaccgaaaccgtgttcgccacgagcctcgcggatgatgcgacccggcatgtcgccgagctccactgtctccgacttgatggcgtatcgagcatgcaccggggcagggctcccagcggcagccgtggtgtgaacggtgatgccgtcggcagccactccaccggtcacgtcggcaccggtctcggtgtccgggaccaccagcgcggcggcgcaacggaagcgcgcggtacgcttgtcatccggaatatcttcgatttgggcgagcagcagcgcattattggccttgtcgtggccgtgagcacccgcccagcgagcagacagaatgcccggagcgttacccatcacatcgacgatgagacctgaatcatccgcgacagcgggcagaccggtacggatggccacagcgcgggccttgagtagcgcgttctcctggaaggtgacgccggtttccaccggatccggcaggtgaaggctgccagcggacaccagttcgatgttttcggcatccgcgccaagatcctcttcgagaatgcggcggatttccacaagcttgccttcgttatgggttgcgacgacgatttgcatgaggttctcctttaagaaggctccccttgtcaggggagctggcttagtctagggacagagcggcacgctgggcggcttgcagttccttgttgcccttttcggccaagtcaagcagggtgccgagttcggcacggttgaacggacggtgttccgcggtgccctgaatctcgatgaaggtgccggaaccggtcatggccacgttcatgtcggtcatggcctgactgtcttcaatgtatggcaggtcaagcatcggagtgccgttgatcacgcccaccgatacggcggacacatagtccttaagcacgcggctggcggacttgatatggcggtgcttctccgcccaattgactgcgtcgaccaaagccacgtacgcaccggttacggaagccgtgcgagtaccaccatcggcctgaagcacatcgcagtcaagctgaatctgattctcgccgagcgccttcatatcgatgacgccacgcaggcagcggccaatcagtcggctgatttcgtgggtacggccaccgattttgccacgtacggattcacggtcggtgcgttcggcggtggcacgcggcagcatcgagtattcggcggtgacccagccgaggccggagtccttgcgccaacgcggcacaccgggagtaaaagtggcggtgcacatcacgcgcgtgttaccgcattcgatgagcacggagccttcgggggcgtcggtgaagtggcgggtgatgcgcacagggcgcagttcgtcgaccttgcggccgtcggcacgaattatttggtgattgccaagcatgtctttgatttcaaccatgcgccccagcatacgccatccgctctatgcctggatagcaactcgtcaaccatcatcaaaccccagcgcaatgtcattccctgcttacatatccattccatgacacttggctgcacgccactattttcttatgcaccactcgcttacagagtcaatgcctgcgtacctgatgaggattgggaaagatcgtccgctggaataagaatgccatattccatgaaatcttggttgaattgcttgcgctgcatagcgttgagttcgtaatcgattaacggcaaatatgtatagtccatgtcatgcaacggctcttcatatcgatgaagcacgtgcataattgccgcgctcggcagtggggaccaccatccatccaagccataccggtacggaggaaccaatgtcaagcgtctgttccttgggttgatatcccaacgcagaaaacggtataaaccagcgagaaacgcaatccagcacgcatcgttcacccgtgcaaccgctcggacgaacgatatacgttgatgttgaacattccgagcatgaatcagattgacgcagagcatcttcaacgtagaccaggtcgctccgctttctattgcatcgaaatcaggaggcctacgcagttgcgccaacaacatatgtaattcgtcttccggaatcgtttgcgagggggccacggcttctaggtgaagaccaaaaccagcccgctcaagcccctcggccaaaacatcaaacaacatacctctttgcccacgcaatacgcgaccaattgcagaccgatccaaaccagtacgctgtgcaagctcataggcattccaaccagtctgcgacatcacttcattcagcacagccgcacacgaattaacagggcaaccagataccacaccgtgatgcacgacatcgcactgttctaacgctcgatgctctacagcgcgccgctctgatacgtcatcgttgcccgccgcgttctcatcattgagagtttcactcatcgaagtcaccttgcctcggccgatttcccggtcatttcatcaaaccgcaatcatcatatcccacaatcccatgacgatacgattcgtcatatcccacaattcagagacggtatgattcgtatcgcatcagttcacacgattcttcaacgattgctccgcaaacgattgctctgcacgcatcacggcattctatcggcacactattcctcccaatcagcccaacgcaacatcacacgcaacatcacacgcaacacccctcacgcaacactgcgccatctctgtaacatcaccgacaacacggcaatcccacaacgtctcggtgcaatatcctctgaaatggtttggtttttcactccacctcgtcggcatcctgaccaggataggaatatgtgtcgttccgcaccatgtacaaaacgttgtcaactgacaacgttcttcaaatcaattggataagacaaatggccatttcccgccaattcatctgaatcaagacgttgtcaactgacaacaaaatgtacattgcaacagcatgcacatatacatatttccccggtgaacagtaccccccccccaaaaaaaacaggggggcggcgggttctagtgatcgttgcaacacctgacctaccgcaaggagggtcaggtgaccagaagccaccgaaacgaagaccgtggcggggaacaccgttggacgttcaacggcgtcgaatatccgacgaggaagctgatgtgcgaggcgagacgcgccgagtacgtgcgcctgctggacgaggaaggcatgaacttcacccaggccgcgcacgcggtcggcgtctcgaaacgcaccggcaaggcgtggcgcaacggcaggacgcgcgccacgggaaggaacgagaaacccctggtggactggtatcgttccaccatggacaaacccaagaccctccatccgcgatacctgagccaggaggagcgcatccagatcgcggaccgtctgcgtctgggcgattcgatccgcgccatcgcccgcctgctgggccgcgaccccggcacggtcagccgcgaggtcgagcgcaacaggaatcccgagtccggcggttacgagccttaccgcgcccagcagaaggccgcggaccggctcaaacgccccaaaccgcgcaaggcggccgagggcacgcgactgtgggacgagatcgccgccgggttgcgcaggcattggagcccggagcagatagccaaccggctgaggctggacttcccggataatggggatatgcacgcgagcgtcgagacgatctaccaggccatctacctgcaggccaggggcgaactcaagcaggagctgaaacgcgccatgaggcaggggcgaaccgcccgcagaccccaaggcggccaaggccgcaaaccccgtttccgcgaacccatggccatgatctcggagcgacccccggagatcgaggaccgggcggtcccgggccactgggagggcgatctcatcaccggcagccgcaacaaaagcgccatcggcacgctcgtcgagcgcaccaccaggttcacgatcctgctgcacctgcccgacgggcacgacgccgaacacgtccagcaggccatcatcgacaagatgcagcacctgcccaaactcctgcgcaacagcctgacctgggaccagggagcggaactcgccctgcacaaacggatcggcgcctcgctggacatggccgtctacttctgcgacccgcactccccgtggcagcgcggcaccaacgagaacaccaacgggctcctgcgccagtacttccccaaaggcaccgacctatccgtctacccggaggactacctcgacgcggtcgccgaggaactcaacgaccggccacgcaaaaccctcgggttcatgaaaccaagcgagaagatcatcgaactgctcgacgccgcgtgataacctcaacaaccgacaacatgaccatggaaggccgctcaaacctcaggtgttgcaaccaccactagaatctgccggccaccctcagctggaaccacgtccggcgaaccgggacgcagttccgcccgagggggacgcggccaatacagccccgggacacagccacagggggtgcaaacacgggggtgcgaccggggttggatctccccgcctcggcggcgaccacaggagtgcggccaacacagacagagggacacagacagagggacacagacagagggacacagacagagggacacagacagagggacacagacagagggaagagtagccaatgtaaccaaagggatacggccagtgagatacggtcagaggactttggtctctgtggtcgaaccgttaagcggacagccctgtgggctgtccgtaggtaaggggagcagctatgctgcgacggattcctatggagacgaaagttctcgtcagagaacctgagtctccgtaggaatcactggctcgcccttcatgaggctctgcgcggtgatgggcagttcggacaacgccttggcgtggtagtcgtgggcggccatgatggcgtcatggccctgccactgagcgtcgatctgcccatgatccacaaagtcgaccagcaggttcttccacgtcggttcaggcgtgaaaccggccagcttctcctccgagccggaaatcacgtgttcggcttcggctaactcgtattcgtaggagcggaatgccagtttgcgaccgggcactgtggccttgtccttggatttcttcatgaccggaaccatcgtgccgtcagcgccttcacgttcggtgagcttgtacaccatcgcacaagtgggagcgccggagccggtgaccagcatggtgcccacaccataggagtcgaccggcgcggtctgcaatgcggcgagcgcgtactcatccaaatcgttggtcacggtaatggtggtgttcgtggcacccagggcgtccagctggttgcgcacacgctgggccatggcggccaagtcgccggagtcgatgcgcacgccacccagttcgggaccggccacttcgacggcggttttcacggcttcctcgatgttgtaggtgtccaccagcagcgtggtgttcttgcccaatgcctcgatctgcgattcaaaggcgtcacgctcggaatcatgcaccaacgtgaagcaatgcgcggcggtgccaatggccttcagaccatacagctgggcggccagcagattggcggtacccttgaatccgcccactacggcagctcgagcggcggccacggcggcccactcgttagtgcggcgtccgcccatatccatgcaaggacgatccttggctgccgacgccatacgtgaggcggcggaggccactgcggaatcgtagttcagcacggatagaatcaacgtctccagtagcgtgcattcgccgaacgtgccttcgacctgcaaaatcggggagttcgggaagaacatctcaccttcgcggtaaccgcgaatcgtaccggaaaagtggaagttctccagccacttaatggtctcggggcttaccacgtgacggtcggccaggaacttcagatccgcttcatccaagtggaaatgttccagcgcatccagaatgcggccggtgccggccaccacgccatagcgacggccttcgggcaagtgacgcgtgaacacctcgaacacgcacttgcggtcggcggtaccgtctttcagagcggcgtcgagcatcgtgtattcatacatgtcggtcatcagagccggcgaataatcgaccattgcaaggcctttcctacataagtggtgaagttgcacctaagtgtagtccgggcaaagccgtgcgggaagggctcgtcttattctcgtatcgccagattcgatattgccgggttcagtatcgtcatatccatcggcactatggcggtcggtcacaccgaccataatcatcacgaccagccaatacgccagccgcaccatacggcccactggcgaagcggtagactcgatgcatgagattcatcgtggcgttgtggcgctttgcgatcgccggtttctgcttcgtgggcacatatgaggcatggtccaaaccgcagttctgggtgtatttcacgttccagaccggtttcgtgctgggcatcgtgatgctgtggtccggcgcggccacactgctcaaaggtattcagccgcctgcatggcttaaggggtgcctgactgtgtacgccatagtcaccgcactggtggcgttcttcctgatgcctccggacgacccggcatacgtgccacaggttattggcatcatgaccaatacgatgctgcacaaaatcgccccgattatggcggttatcgatttcgtgctattcgacccgcaccggcgtttccgctggcattacatgttctcgtggctggcgtacttccctgcatacttggtcttcgtgctggcccgtgcggcgatttggccggggtccggaccggcggccggcggcagtccgtatccgtacgacttcatcaacctcgacgcactcggctggcaagggttcggcattagctgcggcaagctggccatagcgttcttcgtgatatcgctcgttgtctggctgctcgaccgcgcactgccgagcaaggccttactcggatagacgcgcccacgatcgacgcgcattggtcttagtgcccagccggcatccagctcagcactcgatggcctcaacattcgatggtctcaacattcaatggaataggcgcggtttttgtactcgcgccaatccggccagtcttcaccggcgtcgatggcacgcttgatgtcgccatagtaatggagcttgcgctgcacgtgcatggccgcctcgttgagggctcggcgctgctcgtccaaggattcgcggcgagattccagcagatcaaggatttcatcgatatgctcgggctcattggactcatacacgaagaactttttaagatcgtcaatggtcatgccggcgttcttgaagcagcaaatcgcgcgcagacggtcgatatggcagtcttcgtatatgcgctggccggtttcggtgcgctccacgttggtcagcaatccctgatcctcgtaatagcgcagcgtagagggctgcatatggaactgcgtggccacctgacgaatggtgtaggacatcatgactccttactgcggcaacacgccgaagcgtcgcagccgtttgcattcaagttcacttgaactggaaccatagtatccaagaacacttacgaataccgctcgatcggcgtcggtttgcccatcgcaggtaagcattcgtaagaacaagaatgacattgtaaggagactcaatgttcgagccaaccgccatctatgcccccaacccgcaccgttacgacacgatgacctacaaccgtgccggcacctccggcctcaagttgccggccgtctcacttggcttctggcacaacttcggcgacatcacgccattcgaccagatgaagtccctggtcttcaccgccttcgacaacggcatcacccacttcgatctggccaacaactacggccccgaacccggtcaggccgagaagaactgcggactgctgctcgccaagtacttcaggcatcaccgcgacgaactcgtcatctccaccaaggccggctatgaaatgtggacaggcccctatggcgacctcggcagccgcaagtacctgctcgccagcctcgaccagtcgctggaacgcttgggcttggattatgtggacatcttctaccaccaccacccggatccggaaaccccgcttgaggagacgatgggcgcgctggctcaggccgtgaactccggcaaggccctgtacgtgggtctgtccaactacgatggtccgacgatggaaaaggccgccgcaattctggcagaactgcacgtgccgttcatcatcaaccagaacaagtacaacatcctcgaccgcaccgttgaaaagaacggcctgaaagagaccgccttcaagctgggcaaaggccttatcaccttctgcccgctggctcagggcctgctgaccaaccgctatctcaacggcattccggccgacagccgcatggctcacgatccgcgattcctcaacgattccgctctgaccgagaaactgcacaagcaggtcatggatctgaacaatctggccgccgaacgcggccagacgctggccgagatgagcctggcatggctgctgcacgacggcaaggtgacctccgtgctgaccggagcctccaagccgcagcagattctcgacaacatcggcgcgctgaagaacacccacttcagcgacgaggagctcaagctcatcgacgagatttcggctcggtgaccattttggctcccctcgctgaggggagccaagtaccacctttagcgcgtcatttcctcataaatccgcttgcagtcggggcaaaccgggtacttggacgggtcgtgcttggggacccaaaccttaccgcacagggcgaccaccggacgaccggtcgcgcgtgattcggcgatacggtccttagaaacataatgtgcgaatcgatccgcgtcgccaccatcgtcacgaaccggcgactccttggtctccggacgctccagcaccgacgtgccggcaccttggtccgggttgcgcagcggttcggcatcatcaacgaacatctcggcaaaagtcatggtgcacttctttcctcgcattcaacgattcgactgcactccatcatagattcccgtcgttacccgcgaaacccagtggcgcgtaatccgcacacctccacacacccatgtcgcgcatcacgccaccccgccgcatacaatgccacatacaatgccgcacacgacgccacaccgacgccacatacggcaccgcacgcactgcctcatacgccgacgcgacaacaatgcacgctcggcagcacgaagcacaccattcgcggtaggctataaggcatgactatcgcagtatgccccggctcgtatgaccccgttaccgccggacacttggatgtaatcgagcgctcggcgcggtttttcgacgaggtgcatgtggtggtggccgtcaacgccgcgaaaacaccgatgttttccgaagccaccagagtcgacgtgatccgccgcgcccttgacaaagccggttgcaagaacgtcaccgtttcttccaccgacggcctgatcaccgactactgcaagaaggtcggcgccaccgttatcatcaagggtctgcgccagaacggcgactatgaagccgagctcggcatggcgctggtcaatcgcaagctcgctggcatcgaaaccctgtttttgccggccgatccgattcttgaacacatctccagttccatcgtcaaggacgtggcccgccatggaggcgacgtgaccggcatggtgcccgattgcgtcgtgccgatgctggccgatgccctggccgaggaacgtcagcggaaggactgatgcactaatgactatgagcgatgaccaccccactggatacgtcgatctgaccaaaccgaatgcggacgccgcatcgtccactccggagccgtccgccccggaaccgcccgcgtctacgcaagccgcgccggcacccaccgaagaggccgatgttctcgccggatcgccgcccgccgcgcctacccctactccggcacaaatgcaggccaaagcgcaggcccaagcagctcagcagacccgggcacaggctcagaccgctcaggccgccggcattcgtccctcgttcatgaacgaaatgcccgacctgcgagaaaccacggacgacgacccggccacggtcaagagccgcgaggaattcaccacggtgtatgacatcatcgaccagctcgaggcggcactgggcgaagcgaagtccagcatattcgcccccggcatggtgaaggttgaccgcgacgaattcaccgaccagctttccgagttgaagaaaatgctgccggtgcagttggagcgcgcctccgccctcatgcgcgaggccgagcgccgtctggaatcggcacagacccagtccaacgccatcgtcgcctccgcacaaagccgcgcagccaacatgatcaaggacgccaacgaacaggcacagttcctggccggccaagagaacgtcaccgagcttgcacggcagaaagcgcgcgcgattcttgaccaggcacagaccaaagccgaccatctgacccaaggcgcggaccagtactgcactacggtgatggaagggctgtcccagcagctcggcaaactcagtcaggatgtgcaggccggtcttaacgtgctggaagagcgccagcgcgcggcccgcgaacagatgccgcacctgacgctgaacgactatcccgaagcccagtaacgccagcaacgccggcaacatcagtaacgcgaataacgccagtaacgaataactccagccaacatacgaaaggcaccaagaacataccatggcacgagttgaagattccccgtgggccattccggtagcgcagattgcttcgcgcgccggtcaatccaagccgattgacgccgatttcccggcaccttccggcattggcgacagcattgtcggaatcaaggaaggtgagcccgtacacgtgagcgggcagttcgattcgattgtggacggcctgatcttcaccggccgcctggtcgcgccattcgtcagcgagtgcacgcgctgcctgaagccgattgacgaggactggccggttgatgtgacggtgttcttcccgtacgagtcgggtcaggacaaggccaacggcaagggcggcaagagcaagaaggacgacgaaatcgacatcatcgccggcgaggacgagtcggaagacacgtatccgctgctggagaacggcgcattcgcggacatcgaggcgatgatccgcgacacgctggtcgaatcgctgccgttgcaaccactgtgccgaccggattgcaggggtctgtgctcgcagtgcggtgccgatctgaacgaggatcccgaccatcatcacgatgtgacggatatccgttttgccggattggcggggctcaaagcccagctcgaggccgagcagaacggcgagcaggccgagtgacgcgcgcctgaacgaagtttgtacgagccgtgcgttaagataacggacgcttaagctcaattgttcgaacgaaatagaggatactcaaatggcactgcctaagtacaagacctcgcgcgccaacacgcattcgcgtcgcgcgaactggaaggccaccgctgctgcgaccgtgaactgcccgaactgtggcgctccggccctgccgcacatggcttgcccgagctgcggtaactaccgcggccgcacctaccgctccgccatccagccggctcacaccaagtgagtcctgcgataacggcttgaatgaaggccctgccatcgacgggtggcggggtcttcgcataagtgcaccattgcgtacaccatcgcatcgcaaacaacacaacacaacacaacacaacacatcaccatcgcgtgaaggaccatacaacaatcatgagtaatgaaaccccacagcagccgacgccggccaacgagcttcttgaagcgttgggcaccactctcagcccggatctgctcgtgcaggcactcacccaccgttccttctcgcatgagcaccccggcgtggccaattacgaacgcctcgaattcctgggagacgcggtgctcgaactggtctccactgaaacgctgttcaccattcacccggatatgaccgaggggcaactggccaagatgcgcgccaaggccgtctccgaagacgcgctgagcgccatcgccaaaaccaagctcaaggtgggcccctacattctgctgggtcacggagaagccgagcagggcggcgcggagaagaactccatcctatgcgacatcgtggaatcgctcatcggcgcgaccttcctggaacacggcatcgacgaggcacgcaaggtgattcaccggcttattgacgacacgctcgccgaagtggccaccgagggcccggcacttgactggaagacctcgctgaccgtcaaggcgcacggcctcggcaaggaggagcctgtctaccatatggaggtctccggcccggaatacgcgcagatcttcaccgcgcgcgtctcattgggcgagaacggcgacatcatcggcatcggtaagggctccagcaagcgtaaggcgcagctggcggccgccgaagcgggctggaagtcactggactcgttcaagacgcggactaagtaagcccgctgtcggatttgcgaatagactaataccaacatgagcgacgagtcgcgccggggccacaagtctcggggaagcgactggaatcagacacgcgggcacccggccccatcccaaggtcgggcaggttcgcgacaaaacctatgaggtgagaggaatcatggctttacccacgcctttgcaggcattcagcggtgtaccgaaaatcaacacggcccccgataagcagaccatcgtcgatggcgagaagatgactggcgcccaggcgctgattcgttcgctggaggacctcggcgtcgaggacgtcttcggcattcctggcggcgcgattctgcccgtctaccacgagatcaaagacaacacgaagttccgcttcgtgcttatgcgccacgagcaggccgccggccacgccgccgaaggctacgcactggccactggcaaggtgggcgtgtgcatcgtgacttccggcccgggtgccacaaacgtggtcacggccattgcggacgcgaacatggactccgtgcccatggtcgtgattaccggtcaggtgggcgtgcaagccatcggcactgatgccttccaggaggcggatatcgtgggcatcacctacccggtgtccaagcactccttcctcgtgacccgcgcgcaggacattcctcgcgtgctttccgaggcgtactacatcgccaacaccggccgccccggcccggtggtcgtggatctgaccaagaccgcacagaccggcgacatgtactactcatggccgcagcgcatgattctgcccggctacaaccccaccaccaaggcgcacggccgtgtgctgtccgacgcggcgaagctgttctctcagtcgtaccgcccggtgctgtatgtgggtggcggcgccgcccgctccaacgccggcgcacaggtcaaggctctggccgacctgaccggcgctcccgtggtcacgaccctgcccgcacgcggcatcattcccgactccgacccgaagaacctcggcatgctaggcatgcacggtacgattgccgcaaccggcgccgtgcagcgcgctgacctgcttgtggccatcggtgcacgtttcgacgaccgcgtgaccggcaagctcgacgccttcgcaccgaccgcccgcgtgattcacattgacatcgacccggctgaaatcggcaagaaccgtcagcccgacgtgccgatcgtgggcgatgtggctaccgtgctcgacgacttgattcccgagattcagcgtacgcaggccattcagggcaagccgaatctggccccctggtggaaggcgatcgacggctggcgcgaggaatacccgatgacgtgggatgagccgaccgacggatcgctggccccgcagtgggtcatcaagaagctctctgagatggccgatccgtccaccatctgggtgaccggtgtgggccagcaccagatgtgggcttcgcagttcatcgattttgagaaccagcacgcttggatctcctccggaggcctcggcacgatgggctacggtctgccggccgccatcggcgcatccgtgggctcggcccgtgaattcgagggcaagaagccggtgtggctgatcgatggtgacggttccttccagatgacctctgaggagctggccgccgcgttcctggaccacgctccggtgaagatcgcgattctgaacaactccgtatacggcatggtccgtcagtggcagacgctgttctacgagcaccactactcgcagaccaacctgctcgatggtgaagcgcacggtgccgatggtgcggcggcactggccgacggcgatgcgccgctcgaagtgcctgatttcatcaagttggccgaggcatacggctgcgtgggtatccgcgcgttcaccgaggaagaggcgattgccgccatcgaaaaggcgaaccagatcaacgaccgcccggtgctgatcgacttccgcgtgtggaaggatgcgatggtgtggccgatggtagccgccggcgcccccaacgacgaggtgacgtacaagcccggcatcaagccgctggctggcggcaccccggctccgggaaccggtccggacgagcatgcgaccggcgtgttcgagcacgagaccgccgctgccactgcgagcgagcactgaggagaggagaacactcatggctaactatcctgcatcccagcctggttcccagcgtcatacgctgtccgtgctggtggagaaccgcccaggcgtgctggcgcgtatcgccggcctgttcgcccgccgtgcgttcaacatcaactcgctgtccgtctcccccaccgagcgtccggacatctctcgcgtcacggtgaccgccgacgtggaggccgtgccgctggagcagatcatcaagcagctcaacaagctgctgcatgtgctcaaaatcgtggaactcgacccgaactccaccgtggaacgcgaactggtgctcatcaaggtggccgccaacgaatccaaccgttccgacgtgctggagatcgtgcgtctgttccgcgtgcgcgtggtggacgtgaatccggaatcgctgaccattgaggccaccggtgccgaaggcaagatcgacgccctgctggggcttttggagcattacggtgtgattgagctggtgcgctccggtgccgtagccgtgacccgcggcccgcgcgccctgagcgaaaaggtcgtcggttccgaggttaccgggcgctgattcggcgactgcgggaagacccagtccaagctcaaaaggcggatgcgcatgatgcatatccgccttttttcatgcgtgcatacctcatcacccgtactgcaagcaaaacgacagcacctcatgctagcattatgacagcaacaaggaggtgcatcatggcaacattgaccatccgaaaaatacccgatgagcagattcagcagctcaaagaagtggctgagaaaaacaaccgctccatggaatctcaggtgcgatccattctcgaagaatggctggctggcacggtggcgcatgaaatcacgcgaaagaccaatttctatgacgagatccgcgaattcatgaagaacatggattttgagggactcgacaagggggaactcccactatccgagcgaaattccgccgattcccgaccgccagtatcttttgaataggaatcggccatgattattctggacaccaacgtcatcagcgaaatcatcaagaaacagccagacgaacacgttgccaattggctgaggaaccaagatacaagcaatttggcaaccaccgccatcaccgtcgccgagttgttggccggaatatgtcgcatgcctgaaggcaaacgacgaaagtacacagatacgaccgtcaagctggcgcttatgacattagaggacagaacgttcgcattcgacactcaggcagctgcggattatgcccatatccttgtcgaacgcgaacacaggggcacacctaccagtattcaagacgccatgattgcggcaattgcctgttcctgggatgcggccatagccacgcgcaatatcaaggacttcgaaggtaccgacgtggaattgattaatccgtgggagtttgcatagcgggaggccccggcaaactgccgaggccttgtgaacgttacggtttctcccgctactccaattgttcggagagttcgagccattcggcttcgagatcatcgctttcagtattgacggcggtgagttgttcattgagcttgttgagaccctcgtagtcgctcgggtcatgggcggccatctgcgcctcgagatcggccttctgctcttcaagcttagcgagcttacgttcgatggcattcacgcgcttggatgcctcgtggaaggccttgccggtgagcttcgaggtggagtcctcaccgttattggctccctctgacgagggagctatccgcgaagcggactgagggagagatgcggcagcgttgacggcggccgccttacccttaccagacttcgccgagctgctaccggtgcccgcgaagccaggcgtgtcagccggcaatcccttgccgttcttaatagcctcaaccatatcgaggtagtcctgcacgccgccgggcaagtgacgtactttgccgccaatcagcgcgaactgctgatcggtgacgcgctccagcaggtaccggtcgtgggagaccacaatcaacgtgcccggccaagtatcgagcaggtcttccatcacggcgagcatatcggtgtccagatcgttgccgggctcgtccatgatgagcacgttcggctcgtcaagcagaatcagcagcagttgcatgcggcgcttctgaccaccggagagatcgcggatcggcgtcatcagctgggcggattcgaagccgagacgctccatcaactgtcccggcgtcacttccttgccatccacaatgtagctcggcttatagcgggaaagcacttccttgatcttgtacttgccgagcttctccagctcatcgaggcgctgcgagagcaccgcgaacttcaccgtcttgccaatgttcacatggcctgcggtcggggtgagtgtgccatcaatcaacttaagcagcgtggacttgccggcaccattcgcaccgacgatgccgaagcggtcgcccgggccaatcagccaagtcacatcgtcaagaatctcgcggccggaaaccgtcaccttgcgtgcagccgaggtgacaccggctgcagcagtgtcatcatccgaatccgttgcagcagtgccaccgccgatggtttcaccacccgtgttcatgcgacgaacctcgcgatcgtcagcaagctgcggattgccgctctcagcctcggccttcttacgcgcttcctcagcggactcgacggcttccggcacgccggcgtccaccaggcgcgggtcagtcatgtcggtgaccgccacctcaacggaaccatgcagctgcggctcggcgtacatggcgttgaccacatccacgcgggaagcggacgcggagagcgccgccacatccgggtcgatatcggccatgccctgcggtttttcgaaaatctgcgtcacgtcgaccaaatcgaccacctgtttgccgagacgggaggtggccatttgcttcagttcaagtgtgttacgcatcggcggcacatcggcaatcaattcgcgtgcggccttgacgtggaacttctgcttggtggagcgggcacgggcaccgcgggaaagccatgcgagctccttgcgagccagattgcggcgcttggtttcgcgcacatcggcttggcgatcgcgttccacgcgctgcagcatatatgcggaatagccgccctcgaacggctcgatcacgccatcgtggacttcccacatcgattcgcagacctcgtccaagaaccagcgatcgtgggtcacgagcaacagagcgccctggcctttggaccagcggttcttcaaatgttcggcaagccagtggatagtgaccacgtcgagatggttggtgggctcgtcaagtgcaagaatatcccaatccttgagcagcagtcgggccaaatcggcgcggcgacgctggccgccggacaaggagccgaccttggcatccaggctcatgccgccgagcaatgcctcgacgatttcacgggaagtgttatcggacgcccattcgtagtcggcgcgcccctcaagtgcggcttcgcgaatggtggcgttgtcatcaaggggatcacgctggtcaagcatgccgaacgtgagtccgccacgctttgtcacgcggccggaatccggctcctgagcaccgcggaacaggtgcagcaacgtggatttgccgtcgccgttcttgccgacgatgccgatgcggtcgccttcaaaaacaccctgcgttacatcagtgaagatggttttggtagcgaaagcgagcgaaacgtgttccagtccaatgtcataagtcggcatgactcaccaatgtagcgccaccacaggccataggactcccaagaatatgtcccaacaacctactataatagaaagatcggcaaaagaggagaatatcatggctaaaaaaatactcctaaaacccgttctcaaatgggttggaggtaaaagacaacttttagatcagattttgcctctaataccagaatcctcaacatatgtagagcccttcgtaggcggtggagctgttctcctggcaaaacaaccagagaatgctatcatcaacgattacaacagtgaattaataaatgtgtacgaatgcgtacgagatcacactgatgaattgcttgatctccttcatagccatgctgaaaaaaatagttcagattatttttattctataagagcacaagatcgcgaaccaaattttaaagaaagaagcccagtgcaacgcgccgcaagaattatctatttgaataaaacatgttttaacggcttatacagggtcaattctgccggacaattcaattctccatatggtcgctacaataacccagcaatagaaaatagaccagccatacgagcattagcaaaatatctgtccggaaatataaagatattatgtggcgattacgaattagccctgcaaaatcttgataaggattcgtttgtatatttagaccctccatatatgcccatatcatcctctgcatcctttaccggttatacagagggaggattcgattacaacgagcaattgcgtctaaaaaataactgcgacaagcttgcgtcgcagggaatcaaattcctcgaatcaaattcggattgtgaagaaatcagagagctatataaagattacaaaatcatctctgtatcagcgaatcgttcgattaattctagagccgaccgacgaggagcaattaaggaagtactaatcgatggaagataaagccaataaagcttggaccgagctgatacaggaatatcaaatagataatgcaataaaacaacatggggaattcatcatacaggctaaggatattaagaaatatcgagagccacgacttatggcaaaatgggactcgagcgaaagtcttcctacgatattaaagaaatctgatatcaatatattaccagtctcccgttctgcttacgtgctttccaatttcaagctgtatcagccattcccggaaaatgatataaatacagtaaagtacgtccctcccttaccactggaatctattgatttcaacaatctgtccactgaatccaatgcgatcaatgcaatgctcatcactggtatacttgatgacttcttaggcacaaataatacagtggaaactttcaatggtcgaatgggaactaatgatttctcatttactgtcaatctcaccaacggcggcaagcggcaggtggatgtccagagcgctcaactggagatcgacggaggatttgaaaacgatgattccataattattatggaggcaaagaatgtacctcatccagattttcacataaggcaattgtattttccatatcgattgtggtgtgaacgcgtaaggaaaccaatccgtttggtcttttcgcagtatatcgattcaatatatcacttatatgaatatgaatttactaaagaggatgattattcgtcaattcatctaattcaacagagaaattattcttttcagtcttctgcaatttcatgggacgacatacaaagaattatcgattcgaattcaccagaaatagacgacaattacgacgatacatcgataccatttattcaagcagatttattcacacggttgatttccctaatagaacaattagataaagtacccaatatgacttctgctgaaattgcatcatctatggaatttgacattcgtcaagcatcatattattcatcggcaggagaatatctcggagtaatcgagagaccgttgcgaggtcattcacaactttccttgacaggcatcaaattaatgcgcttgaaacttcgcgaacgcagattagagctcattaagttaatcgtcagacataacatttttcacgatcttctttcgcaaatcatcgacactggggagttcccctctcgcgaagctataattgataggatgaggcgctataatgtttgtaaagatgcaactactctatatcgtagagcttccagcgtctctggctggctacgatggatagtcacgcttcccgatactactgaggaatttgaataattcattgtacgatatatactaagtcatagtatcagcatcaaaaggaggcttgatcatggttaatgataaacgccctgtaattcagactcaaggatacaacggcagtgagcctacgcgcatgtgccctcattgcggaaaagaaaaaccactaagtgatttcggttaccgaaatatggggaatgatactatccgtaaccagtcatggtgtaaggactgtcgataaaagtaatgcaccgcgtcatgaacgcggtgcattactttttctggttataggttatttgttcagcgtctgagcgtaggagttgcagcgggccgcaaaaccggagaacacttgctcggcgagcggatgcagtagctgatcgtattgggcgaactgctcgcgcaatcgggacttggacccacccgcggccttgagatccttgaccatgctcggctcatccagccattcgtccagcagcgagccgcacacctcaagatggaactgcatgcccagcgcggatcccagtcggaatgcctgcaccttggtggaagacgaacgtgccagcagctggcctccctcgggcaagcccaccacgtcgttatgccagtgcagcaccgtcagctgcttatcccacatggagaagaagtcatgcttgtccacacgcttgatcggcgcgaacccaatctccggcgcatcgcccttacgcagctgcgcaccaagcgcagtggcgataatctgatgccccaggcatacaccgagaatcggcttgcctgaagccacggcggcacgcgccaacttggcttccgccttcagccccggatacttgtcgtaatcaagcgcgcccataggcccacccatgattaccacgccagccagttcgccgaaatcaggcaagtccggtttctttttgtcgacgatattcatcgtcaccgtctcaagaccgatgtcttcgaggttcgacaatatgcgtcccggacgttcccatgggacatgttgcaaaatgagcacttgtggtgtggccatgacttctattgtggcacgagcgttccccgtttgcgtaacaggcagggcaaatccatgaatctcgcagtttccgcagcggtcaaagacgtgttctcgcgagactgttgtcccgcttctcatccgtctgtcacctcgttcgggccccgcctgtgaagcgttcaccaagctcttcgagtaacgattcagcatgtctggttcggaccctacgcttgagcgttatgggaaacagccaagaaccgcaggatttcaacatttccgtcatgccttcaagcctgacgccggtgcatgtcgccaaggccgcagaaggcctgaatctgtatgacaccgcctcgcaccaggtcagccatttcgtgccgctcaagccgggcgaagtcggcatttatgtgtgtggcgccaccgtgcagtcgtcaccgcatatcggccatatccgtgccgccgtggcgttcgacatcgtgcgccgctggtttttgaagctcggctacaaagtcacttttgtgcgtaatgtgaccgatatcgacgacaagattctcgttaaggccgcggccgcaggccagcgttggtgggcccgcgcctattactacgagcgcgaattcaccgaggcatacaacacactcggcgtactgccgcccaccgtggaacctcgcgccaccggccacatgtcggacatgatcgacctgattcagcgcattctcgacaacggacacggctatgtggtcacggatgcggacggcaagcccaccggcaacgtgtacttcgatgtggcatcctggccgcattacggcgaactcactcaccagaagcagacctccgaagtcgatgaggccgccgccgtggccgaccgcatgggcccgtccgtggacgccaccggtgccgacaagtacaatccggtcgacccggccgatgcctcccccgacaagcatgatccgcgtgatttcgccctgtggaaggctccgaaggacaccgatcccgaggacgcccgttggtcgacgccgtttggcgtgggccgccctggctggcacatcgaatgctccgccatgtcccaccgttacctgggcgatggcttcgacattcacggcggcggcttggatctgcgcttcccccaccacgaaaacgaaatggctcagacccgtgcggccggctacccctccgctgcgcgctggatgcattcggcatgggtgaccgccaagggcgagaagatgtcgaagtcgctgggcaccggcctgtccgtgccgagcgtgttggctgagcattccgcttgggtggtgcgttacgccctgggctccgtgcagtaccggtcgatgctcgaatggtccgatcaggcgctggtcgaggcgcaggccgcatacgaccgcgtctcgaacttcatcgagcgtgccggtgtggcgctgggtggacagccttctcgcgaggaagtcactgccgtctccgccgacgatttgcccgccgatttcgtggccgccatgaatgacgatgtcaatgtgtctggtgcaaccgccgcgatcttcaccgccatccgttccggcaatacgttgctttcacagctggctgaccgcgccgattccgaaaccgccaaggccgaggtgcgtgaggcgctgctcgccgtgcgtgccatgctcgacaccttgggcctggacccgctggccgaaccgtgggtgtccgccggcgctgccggcggtgccgctgatggcacggccgagtcgcccgagcatgcagcgctggaggcactgatcgccgaacagctcaacgcccgtgccgaagctcgcaaggccaaggatttcgccaaggccgatcagattcgcgacgccctgaccgaggccggcatcgccatcgaagacggcccgcagggttccacttggagtctgaagtagtcgcttcaaacccatcaatcagtcaaacacgaagtccacgtccacgatgtgcaggcgcttgctgagctccttttccagcgagcgcttgcattcgatgaggtcagctacatcaatggtttcgccgatgccgctcagatacacgtcaacggtgtagttcataccggtcttgaagatcagcgtctgctcgtagtcggtgttggcaggcagatggcgctgtgcctcggcctccacgtaggcgttggtttcatcgtcgtcatgcacgccgccgaccaattccacgaacgcctctttgagcacgctgaacggctccttgatggtcaatgccaccaaagccacggtgatgaagaaatcgccggtgtagtgcaggaagtcaagcggaccgccggccggtagcagcatcaggaagatggcaactacgccgatgccgaacgacatcgatccgtcgaccaacgtgctcttgcactcggcggtgagcatggtgctggaatcgccgatggatcggttggagcgccggtaatacgtgtataggctgaagcacacgattacggtcaggatctcgtagatgaccaccgggccggtttcaatgcgttcgccggacccgaacacgaagtagtcgtacgctactcggcacacgtcaatcagcgaatacaccaacaacgacatggtgaaaatggccttgcagatcgcgtagataggttccagtgcgaacatgccattggggaagcgctcggtggttcgcaccgtgcgcgacgagaggtacaccgccaccattccggacaggacggaaatcgcggtgaaggagaagtcgaggaacatggccttgagaccggtcatgaagaacacggccatgccggctaagacctgcagcacgttgatgacgataccaacgatcagggctttgcgttcgagtagtttttgggtgggcatcagtgggccttccttattgcacggcatgtctgcgttggcccgaacgtcatggttcggagcgcacggcagtctgcgtataagcggtgtccagcgattttcaaaacagcgtaagtattccaaaaaacacaggattctttacggtttccatggtatcggaagcactcgattggcttcgccacgagcggacggcacggcatttgccgtctgaatgcccaacatccctgactactacgcggcacattccccgaaaagcgtcgtccccaacaccgcaatttcccgcgtggcggctagactgttgcccattatggcagctttttcatctttgacagacagactctcgaatgcgttcaagcatctgaagagcaagggcaagctttccgaggcggatatcgacggcacgatccgtgaaatccgccgcgcgctgctcgacgccgacgtggcgctcgacgtggtgcgttccttcaccggcaaggtgcgtgagcgtgcactgggcaccgaggtgtccgacgcactcaacccagcccagcaggtggtgaaaatcgtcaacgaggagctcaccgacgtgctcggccaaggcgtcgaccgtccgctgaacttcgcgaagaacccgccgacgatcatcatgctcgccggccttcagggtgccggtaaaaccacgctggccggcaagctcggctactggctcaaggattccggccacacgccgctgctggtggcggccgatttgcagcgtccgaacgcggtgacgcagctgcaggtggtcggcgaacgcgccggcgtgcccgtctatgctcccgaaaagggcgtccaatccgatggcggcgaggccgtcgcagctccgggccagacctccggcgacccggtgaaggtggcccgcgattccatcgaactcgccaagcagaagctctacgacacggtgatcatcgataccgccggtcgtctgggcgtggacgaggagctgatgaagcaggctcgcgacattcgcgatgccgtgcgtcccaacgaaatcctgttcgtcatcgacgcgatgatcggccaggacgccgtcaagaccgccaaggcctttgacgagggcgtggacttcaccggcgtggtgctctccaagctcgatggcgacgcccgcggtggtgccgcgctgtccgtggcgtccgtgaccggcaagccgatcctgttcgcctccaacggtgagggcctgaaggacttcgaggtcttccacccggaccgcatggcctcgcgtatcctcgacatgggcgacatcatgacgctcatcgagcaggcgcagaagcagttcgatgaggaagaggcccgcaaggccgccgagaaaatctccgaaggttccttcggcctggacgacttcctcgatcagctgcagcaggtgcgcaagctgggctcaatgaagtcgctgctcggcatgattccgggcatggcccagcaccgcaaggaactcgagcagttcgatgagagggaaatcgaccgcaccgaggcgattattcgctcgatgaccccggccgagcgccgcgatccgtcgattatcaatggttcccgccgcgcccgtatcgcctatggttccggcgtgacggtttctcaggtgaacgctttgctgcagcgtttcgagcaggccgcaaagatgatgaagcgcatgtccaatcgtggcggcatgggcggcggcatccccggcttcggcggcccggctatgggcggcggcaagaagaagggcaagaacaagaagaagggcggcaagtccggcaatccgatgaagcgcgaggccgaggagaaggcattgcgcgataagctggccggcaagtcctccggttcgaccggcggttccgccttcgccaagaagccacagaacccgcccctgcccgctggccttgagcagatgatgggcaacgtcgacggtggcactgaactgccgccgaacctcggcggaggccttggcggactgttcggtcgctgatctcacaacttggctcccctcgcagaggggagccaaattatatctcggttcaatttatatttcgaaaggaacttccatgacgacaatcctcagcgcggtggcaatcatcgcactgttatggacgaccttaagcgcgctgcccgccggtctcgaggcccgtatgccgcttccgtacatgattgccctgacgccgctgttgtgggttcctttgatgattctggccgcggtcgccgcatggcaacatgaatggactgcgatgtcgttgcttattgtggtcgcgctgattgccagctcacagcgcatcaactactggggtacgtcaatcgacccggccgggaaacgcaaagaatcccaccgtgaaacagcccgtgaaacaacttcgccgacgctgtcaaaaagccataacagcaatacatcgggtacctcaaacactccgaaggaagggcccgaaaccatctccgatggacactgtgaaacaacgcgtgaaacactctcgccccagttctcggttatgacgatgaattgtcgatacggacgcgccgacgccgctgaaatcattcgcaatattcgcgaacgcaatatcagcgtattggccttgcaggaagtcaccgacgacctcatcacacgtcttaccgaagccgacatcaacgaacttctcccctaccatcagttcggagacgccaaagagaccgataatggcggattcaacgtgatctattcccgctacgagccgagcgcagcggtgcccaacgtggtctccatccccgccgccgacgttcccgccatcaccctcaaaacctccggtaatcgcacggtgacgctttgttcggctcacccgaaatcgccgatgcgcggctgcgcggattggtcggccggcattctgggtctgcgagaactcgcccgtgcaaaatccgtcagcaatcgcaatatcgtcgtcgttatgggcgatctcaactcgagcaccgaccatccgagcttccgcgcgttgctcaagtccggattcaaggacgcaagtctgattcaagccgccggcccgaatctcaccttcccgagctggctcaagtggccgcgcatcgagctggatcacgtgctgttcactcccgggctcaaaccgtccggcgtgaagtcgtttgaggtcgagggcactgatcatctggccctgaccgcaacgcttgcactgcgatagccggcattttcgcgatacattccccggaatgttgcgcaacggggaacgcgcaccacaccgcaaccacagtgcgccacgcccagtccggccctgtgcgctataataggccagttattcgcgcgcgcgtggcgccctctacaccccgagccgcgaggacacgtggattccggacggccatgccccacatggcaaaccgagaacccgcacacctagcattacaaggagagccattttggcaaccaagattcgtctgaagcgacagggcaagaagttctacgccttctaccgtgtggtggtcgtcgattcccgcaagaagcgtgacggcaaggtcatcgaggagatcggtacctacaaccccaacacccagccctcgaccatccagatcaagtctgatcgcgctcagtactggctcggcgtcggcgctcagccgtccgagcccgtcttcaagctgctgaacatcaccggcgactggcagaagtacaagggccttgaaggtgccgaaggcaccctgaagaccgttgaggctggcccggacgccgaggcccgcatcgcggccgttgaggaccaggctcagaagctgaaggccgccaagtccgaagctgctgccaaggccaaggctgaagccgaagccgctgccgccgctgaggaagccccggctgaagaggccgccgaagaagctccggctgaggcctgagcggaaacgaaaggctagctatgcttgcacaagctgtggaacacctcatcaagaacatcgttgattttcccgacgatgtttccgtcaagtctcatgagaacgcgcgcggcgaactgcttcgcgtacgcgtgaacccggaagacatcggccgtgtgatcggccgtggcggccgcaccgccaacgcgattcgcaccgtgattcaggcactgtctgatcacaaggtccgcgttgacatcatggacgtccgtcgataaccgataaggaacgattcacagcatgacacagcaagacatgcacgacgaccctcagcagctcgagttgctgagggtcgctcgtattggccgcgcacagggcctgaagggcgaagtcaccgtgcgcctgtacaccgatgatcccgagtggcgcttcgagccggactccgtgctctacagccaggatggcgagaccgagtacatcgtcgagggctcgcgcacgttcaaggatcgttggattctcaagcttgagggcgtcgacgaccgcaatgccgccgaggccctaaatggtgtcgaactctacggcgaggtcgacgatgcggaggacatgctcgaggccgacgagtggtatcccaaggatcttattggccttgaggcccgtctagtcgagggcaacggtctgggactgcccgccggccaagtggtcggcaaagtggtggatgtgatcgactcccccgcccaatccctgctcaagattcgtttgaccgagccggtggtaaccggccagaattccaagggcgaggatgtggtcgaaaagaccgcgttggtcccgttcgtggaggccttggtccccgacatcgatctggaggagcaatatctcacgctcgatccgcccggcggcctgattccgggctgcggcatgatctgacacataggggggggcgctgcgcatgcagcgccccccctatgttctgtcggttcccaaaagggcgctccacgccatgggtcatatccatccacggcgtggagcggaccggacggccgccgtccgcgtcaccgggccgccgcggtgacgcgccccatgaaacgatccaggaattccggcacatcgacgcccaaggcgacctgcgtgtgtttgtcgggatcctggagccgtgaacgatcgccgatggtacggcctcggaacgggccctcgagattgacttgcaagttgaacccgaaggtcgtgaccagcgatgggtcgagcgcggcggccacggccagcgggtcgtgcagtccacatccgtgaatctccggctggttcttcaggtagaagtcgatgtagtagtcggtcatggtgacgaggaagtcgccggccggcgtccccaaagacgcccattcatgggctttctcacgggtgagcgcggtctggtgggtcacgtcgaggccgatcatggtggtgcttgcgccgcacttgaacagatagtctgctgcctctgggtcttgggagatgttcgcttcggcagccgggctcacattgccgggcagcgtcaacgcaccgcccatcaacgtcacgttcacaccggaatccttcaagtccggagcgttgcggaatacggtggccatggtggtcatcgcgcccgtaggtacgatggtcaggtccgggccgtattcgcgcgcggcggtgatgatgaaatcgaccgccgagcctggtgcttccggagcgcgcggggagtcggggatgattgcgccgccgatgccgttgggatggtggaccgccaccgagccgggagttggtgaccacgaagcgtccgtttgccagccgtccgcgccgccgttctgccagcgcgcgtaggcctgggcccgctcgtctggtgtggtgccacgcattttcggcaatgttgccggggcgatgggatggtcgactccgggatagaccggaacgtcgtcacggccgaacaagtgcagtaccgccagcgcgttgcgcgcggccagcggcaccgcgacattgccgtaggtggccgtgataccgatcaaatcgatctcgtcggcactgcctagggcatatgcgatggcgagcgcgtcatcgatgccggtatcgaggtcgaggatgagttttttgcgcacaattatctccttgtggaactacccgggactactccggcgactacccctcagtctcgctacgcgagacagctcccctgacaaggggagctgagaaagttcagccgagcttggcgagttcttcgggggtgagttcgagctggtcggccttcagggagtcgaggatggtttcgggacggtgcgcgccgggaatcacgaacatgtggtcgcccttggcgagctcccatgccagcacgacctgctggtagctcacgccgtgggccgccgcgacctcgcggaacgggtcgaacttggtctcatcataggggtgacggtagccgccgagcgggctccagcacacgaaggccaagccaaccttggcgcagtagtcgagcgtgtcctgggtctccaggtgaatcggcgagtactggttttgcacggccacgagcttgtcgcccagaatgccgcgcgcaatgtcgatttgctcgatggaggcgttggagataccggcctcctgcgccacgccctcgtccaccagctgcttgatggcttcgacggactcgttgtacggcaccttcggatcggggcggtggaagtacagcaggtcaatggtgtccacgccgagcgccagtgcgctctccttgccgcgacgaatcaggttctccgggcgaccgtccacatcccacgtggggcggccgtcggtgaagttgcggaagtggcccaccttggtggccaccagcacctcgtccttcggccctttccaggtctcaagggcctcgcgcaccagcttttcaccggtctgttcttcgccgccggagcagtagtaagcccaagcggtgtcgatgtggcggcagccggcgtccagcgaggcatgcagggtttcgatgccgacctcgtggccgcgattgttttcgatggtcagcggcatttcgccgtggccgatggcggtggtggagaacggtccgaggttacggaacaatgccatggtgattcccttcaacagtaatgagacggtctgtgtccgattccagcgtaagcagaacgctggatttaccgcccaccgaacgagccgccacccgaaccgccgaacgagccaccgaaaccggagccgccacccgagccgaagctggagaaatcgccaccggaatcggcggatggcgctgccgcgctgatggtcgagctgatgtcagcgagtccggagttcagctgcgagccaaggtcggagaatccgccggcaaacgacgtgcctccgtaagccggagctgggccgctaatgcccgggtccatctgcccggcagcatcgtggtcgaacggaccattatggcggtggctgtaccagccatacgggcggtagttccagtagaacaacgagttggaggcgttggcatccagccaagccggatcgttgacctgaggataggccttggccagttcacgcatcacgcgatcggaaatgccaaacgcggcggcgtagaccatataccaatcccacaaggccaaatcggcggtaccacggtcggtgaagttggagaagtcttccatataacgcttaaggcccagagtccggccggcgatatcctggccttggtcggtgagcacggtcatcgcgccggccatcgagcagaacaggccgaccaggaatatcggcagctcgataagaccagccaccgggtatccgataaagctgttggccagcagcgaacccaatcccagcacggcggccagtacgccggggaggatccattgccagcccacagagcgtgtggcacccagccgctggtattccatgctgcatgcaccggtgaatttgccgagctcaatatagccgtcttgccagttctggcaggtcgccttcatctggttcaggtcgaataccgggctgcccacgcgctgcgaaatgacgatgagcaggttcagcagcgcatcttccgattcactcaatcccaactgttgcgcgttgggtgcctcatcaatggcgagcggcagaatcacgatggtgctggtgatgcctgccgcatactgcttgccttggtcggcggcaatcatttggctcaagcccaccggcgtggcctggctcatgtcgatgccgcgatacatgtccgacggccccggatagacggcaatggccttcttgacggcgagcgacagcatggtggctgtcagctggcggtcttcatcggattggcgcgtcgacggatcgaccacgcgaatcagacgggctgcggaagccggactgatgccgggctggtcgcgccagtattcgacgctgccacggtattgcgcacgccggttgctggagatcacagcccagataccccacgcgcacaacgcgatgccgagcacgatgctgacaatccagaacacgagacgagctctggcagcgaatcgttgcttgtcgagccagcgctgctgttgcttatattcgtcctgtttcaggtccttgagatgattgccggttcccttgcgggcgatgtccttggctttggcggcatcgaacgccgcgaccacatcgaggtagtcgccattgtggatgttgtaggccgtgaacgtgtagctgccgtcgctgttgcgcttggtttccgaagtgcgctcggtatgcagccatgcccatgaggttttgccggtgatgccgttggggaagtggacggtgccggtgaccgtgccgataggcacttggttcttcttgccgaacggctcccattggaaggaggccacgtctttccatttggtggccacatcgtgcatggtgaagctcacgtcgaacttcatactgtcggcctcggtggtgaccggaatattccagccgatctccacggttgtgttatcttcggtggcggaggcgctgggcttgaggccatcggtaccgggcgtgtatgcctttggatggtcgctgccatcgctcacatcggcgatataccaatggttggcgtagtcactgttccattccttgtcggaagagacgtcactgggcagcttgggctcgctctgttgggcatagtcgatgccgtctgtgacgttgcgcacgctgatatcgctgatatcagtcaaggtgccggagttcagcgtgtattgctgaaacagttgcttccacggcttggtgttgtcgtcactgtcggtacgctcacgcatcttgacgtcgatatgctgcgtgaccttcaaatcaccgttcgcggtggcggccacatcatagtccagcgtgcggtagctgaggtcggccgaatcgccgaacgcggaagtctcgattatcgccaaggtgataactgccaacaccaccgtggcaacaatgctgacgattccggcgcgaatgaatcgtatccacatatcttccctctcttaagacaatacgggcccggccggcggcttaccggacgggcctggagcgggtcagaactggacctgtggcacctgacgggaggcatcatcggcctcgaagtattgcgcctgttcaaagtggaacaaaccggcgatgatgttcgtcggcacggtttcgatggcggtgttgagcttcaggaccacgtcgttgtagaactgacgggcgtaggcgatcttgttctccagttccttgagctggttctgcagatccatgaagttctggttggcttgcagctgcggatatgcctcagccgtggcttgcaggttgaacagggcgcgggacagctggttttcagcggcggcgcgctgagcagtggtcgtgctcgggttgctggccgcagccactacgccggcgcgggcggcggtcacctgagtgaagacttcagactcgtgggatgcgtaccccttgacggtattcaccaggttcgggatgaggtcggcgcgctgcttcaactgcacgtcgatttgcgcccaaccgttcttcacacggttcttcagcgtcaccaggttgttataggcgctgacgccccaaccaatcaagacaacgataataacgacaacgacgatgctgacgatcagaccagtactcacctatgctcctttgctggaccttgctgcgaccattcttccacactcgcacgtaaacagaaaatttatcacagagtgttcatcgtgcggacttgtcttgtaccgctttaccgccgttctcccgtcgatcgaccgaagcgggaaatcgccgcccagtctgacgaagtattccagctcgctccgttacgagaacggtaatactcggcaatactcgcgctgaatatgcgaaagcccgccttgcggcgggctttgccgtttctcctacgcacaaatcattacgctgcgcgcaggaaacgatcagccgaaccttccagagatgtagcgctcggcttcttcgttttgcgggttgttgaacatcgtcatggtgtccgcgaagtactcgaggtgaccgggctggcccacggccttcaggttgaagaaggcggtgtagtcggcgatacgggcggcctgctgcatgttgtgggtcacgatcacgatggtgtagtcgctcttgagctcgtcgatcagatcctcgacagccagggtcgaaatcgggtccaaagcggagcagggctcatccatgagcagcacctgcgggtggacggccacagcgcgggcgatgcacagacgctgctgctggccaccggacaggccgatgccagggttgtcaagacggtccttgacctcttcccagaggttggcaccgcgcagagcccactcgaccagatcgtcggcgtcggacttggccaggtggtggttgttcaggcgcacaccggccagcacgttctcacggatggacatggtcgggaacgggttcggtcgctggaagaccatgccgacgtcgcggcgcacggccaccggatccacgtccttgtcgtacaggttcttgccttcgagcagcacctcgccctcgacgtgagcgccagggatgatctcgtgcatacggtccaaggtgcgcagcacggtggacttgccgcagccggacgggccgatgaaggaggtgaccttgttcggctcgatgttgatgttcacatcttccacggccagaaagtcgccgtagtagatgttctcgtggttgacgtcaatacgttgtcccatgatgtttccttatatttccttgtgttcttaaggcttaggcttagcgactggcttagcgttcggtcttgacggcgaagaccttcgccacgattcggccaatgaggttcagcagcagcacgatgacgatcagcacgagagccgcagcccacgcacgttccatcggaatcgtggtcacgcaggtggcgtcggcgttgggcgggcagttcgcgctgagcttcgagtactcctggtagacgaacaccggcagggtggtcatctggccggagaacaggttcacgttggtgctggagatgtagccggcggtcatcagcaacggtgcggtctcaccaatcacgcgggcgatggccagaatggcaccggagacgatgcccggcagagcggtgcgcagcacgatcttggtaatcgtgcgctgcttggtaacgcccagagccaaggaagcctcacgcaaatcgttcggcacgatcttgagcatttcctcgctggacttgaccacggtgggcaacatcagcagggagagagccacggagccttcgaaaccgttgatggtaccggggcccagcagaatcgtgaacatcgagaaggcgaacaggccggccacgatggacgggatgccgctcatcacgtcgatgagcagggagaccgtggtggcgagcttgccgcggttcgagtattcgaccaggtacacggcgcacatcaaaccgatcggaatagagataaccatagcgccagcggtgatttcgagagtaccgatgatggcgtgcagcacaccgccgtaaccaccggacggggtctggttaccaccgaccacaccggtcatgttgtagctcaggaagttcaggttcaggcgcttgatgccgttgacgatagtggtccacagcagggagatcagcgggatgcaggcgatcacaaacgccaccgcgatcaggacccgcatgaagtggtccatgatattacggcgctggatggcggaacgggtcgggcggaaacgatcgaagtcgatttcgggcgcgccgtccatcggagtcttttcagtgttctcagcagcagtcatcacgcagtcgctttctcggtaagcttacgggcgatgaagttgaccacgaacgtgatcaggaacagaatcagaccagttccgatcagcgtggagacgcccagatcgttggcttcagggtactgtgcggcaatattcgcggcgatggtctggttctgcgaggcctgcagcagcttgatggagtagttgaggcccggggacaggatcatcaacacggccatcgtctcaccaagcgcgcggccgagagccagcatggaggcggacacaataccggacttgccgaaaggcagcacggccagacgaatcatctcccacttggtggcaccgagcgccagcgcggcctcttcgtgcaggcgcggggtctgcatgaagatatcgcgggacatggaggtgataatcggcaaaatcataacggcgagcaccacagccacggtggcgacggtgcgcgacgggttggcggccgggccctcgaacagtggaatgaagcccaggtggttggcaacccagttccagaacgggtagatggccggcaccagaatcaggccgccccacaaaccgtagataacggacgggatggcagccagcagatcgaccacatagctcagcgcggtggcgagcttcttaggtgcatagtgcgaaatgaacagcgcaatgccgatggacacgaagaaggcaatcagcagtgccagcaaagacacgagcacagtaccgaacaacagcgggagcacgtagccccagaagctgctggccttgccgccggtaaagctggacacggtgtcgctgttggcggcctgatcgccaccgatgagtggccaggcgcggaaaaacaggaacaggaacacagcggcaagtacaaccaggatcaggatgccgcaggcgtatgccacaccgcgaaacaccttgtcggcggtcttgcctccaactggctgcacagccgttttgtcttgcgaactcacggattctccttatatagggtggttatcaagtattcaagtggtgcggttttcgtctgtgactttgccaaaccgttcgggtcctgacccgctttaagccgcagccgtatggtttacgactgcggcttaaagttggcggcgactgctcttactactacagtctatcgttcagttgtcaggtccagtccacacgacccttgcgggccgacgtcatcacttggtcttgatggcctcgatggacttggtgatcttagacttcagggaggagggcagcggagcggtgccggcggcatcctgagcggccttctggccctcgtcggaggtcacgtaggtcagccaagccttggcgaactcagcctgcttggagtccttgtaggccgggcagacgatgtcgtaggagaccaagacgatcgggtaggcgccgtcggcctcggtggcgtggttgatcttgatgacgatgcggttgtcgcccttaacggtgtcgtcctgcttggagtcctcgatgaccttggagccggcctcggcggaaatctcgttgtacttgtcgccgaccttgacggccacggtgcccaggtcgccgacctgggagaagtcagcgtagccgatggtgccgtcggcctgcttgacggtggagatcacgccggaagtgcccttggcgccctggccaacctcgttcggccagttctcggagaggtcgtaggtccagttgtcaggggtgacgtccttgaagtaggagacgaagttctgggtggtgccggacttatcggagcggtgcacgacggtgatggcggtgtcgggcagcttcaggtccttgttctgatcggcgatggccggatcgttccacttggtgatcttgccgtcgaagatcttggcgatggtggcagcgtccatgttgatgtgcttgccggcatcggaaacgcccttgaggttgaagaccacggcgatcggggagatgtagaccgggacatcgaaggcggtgccttcagtgcacacggacttggactgctcaacttcgtcatcggcaagggccttatcggagccggcccaagcggtggcaccggtcaggaaggtctgcacgccagcgccggaaccggacgggttgtaggcgatcttggcttcagggttggtgccctggaagccggcgatccaggcttcaacggcggcctgctgagaggaggcgccggcgcccgagaagttgccggagaccggggtggacttggaagtggaatcggaggaggagctgttgtcggtcgtggtggcggtgttatcgccgcaggcggccacggaagcgagcatcacaatgccggacagagcggcaatggagcgaatgaggatgttcttctgcatgattattacttaatccctctatcaactattcgcgggcggctcagcgctgcccggtcaattcatgacaactacaagcgtattggtggtttcaagggcccaaaaccgaaatcagtaaacagaagatgaacacttggatgtttgtgggctacgttgaggctacgtagtttttggagtggactcgcctgcggcgagcccacaatccacaacaaaaaaggcggcccgaaggccgccttccatttactccgcgggagtatcgatcttgtatccgagaccgcgcacggtagtcagatacttggggtgcgccggatcttcctcgatcttggagcgcacgcgcttgacatgcacgtcgagcgtcttggtgtcgcccacataatccgaaccccagatgcggtcgatcagctggtgacgcgtcatcacacggcccttgttctgcatcaggtattcgagcagttcgaattccttgagcgggaagaacacggtttcgccgcgtacggtgacctgatgctggcctacctgcatggcgatatcgccgcacaccagcggaatatcgtcatccacagtgccggaagcctgggccgtggcctgattgcgacgcatcacggcacggatgcgggccagcagctcacggaaagagtacggcttggtcacataatcgtccgcaccaatctcaaggccaacgaccttatcgatttcggcgctcttggcggtgagcataataatcggcacacggctctgctcacgaatgcgacggcacagtgcagtgccgtcaatgcccggcagcatcaaatcaagcagcaccaaatcgatgccgcccttggtgaacagttccagaccttcctcgccagtggcggcggcggacacgtcgtacccctcgcgtgtgagctggtataccagcggctcgcgataggattcctcgtcttcgacgataagaatgcgtgccatagtagcctttcttgggtatgtccccgtgcgcataggcgcaaagttttccgacactatcgtaaccatttgttctccgttagcctgctgtttcctgaaagtacgtaattgcgtaattgtgctacgcacggtgtgcgcacctcgcccactgtgtgattgtgcggcaatggaatggcaccatatcgggcaccaaccaaggccctacgcttgtgtcgactcgtccggccgggcctcatcgtcatcctcatccggggcggccggcagctcgatggtgaacgtcgacccctcccccgtacgcgaccagaccgaaatccgaccgccgttctcctgcacgcagtgcttggtgatggccaagccgagtcccgaaccgccggtctcgcgcgaacgggccgggtcgacccggtagaaccgctcgaaaatgcggtccagtgatttggcggggatgccgatgccctgatcgaccacgcgaatggtgactttgccatcgcgctcccccacgccgaccgccacagtggtgtgttcgggcgagtaatggatggcgttctctacgaggttcttgacggcggtttgcatggcctctttgtcggccttgatcatcggaccgctcgtggccgggctgcctgattcttccaaggaaccttcgccatcggccagctcctcgaccttcgtgggcactgactgtccgttgacactcagtcgaatatccacatggcgggagtcggcttgggtctgattggcggcgatggcagcgcgtgccacatccagcgcggaaatgcgccgcgcatcaatcacactttgcgggctttgggctttctgcaagtcgataagatgatgtaccagttcggtcaggcgcgcggattccttggagatacggccggaaaaataccgtacggcgtccggatcatcggcggcgtcggtcacggtttcggccagtagcgagatggcaccggccggagtcttgagttcgtgcgaaacgttggtcacaaagtcacggcgaacggcctcgaaacggcgctgctcggacatgtcgttgatgaagatggcgtacaggtcatcgccgatatcgccaatgcgcacacgcaaatacagcatgttggacgggcgtgactggccggcctccagtcctcggccattagaggacggataggaattgcgattgaccggcagctgaacctcacgctcacgcatgccaccgtcggcggcggcctgagtgaggatgtcctcgacttcacgcgagttgagtcggtcgccggagactaggccgaatggcactgagccggggcttgaatattggaccagaccgttgcggtcggtgacgatcagggcttcgggcaggacttcaatcaggcgacgctcggtggggcgcacgggcgcatcatcaccgaatagagaatgcgtatcctcgtcgccggacaggtcctgttcggcggcgagccggcctgaaacgcggcctttgttgtaggcgatgacggcaacccacaccagtatcagcgcggcgagcaccacaatcacgacgatctgccagatatccatgatttccagagtaaaacgtgcgaggcgtagtgagatgcctaaactacgtaagttcgtctattgttcatttttggcgggacgacataacaaaatgctcccgctggcgggagcataatatggggagctctatttacagctcgtagtccttgtccttgctttccttgatcaggaacagagcgagcagagcgagggcagtcatgatggccatgtaccagcccacaccggcaacgccgaacttggaggtgaccagttacaggcgcttgacgatgtcgacagccagacgggcggcggtatcggcgtactcggagatgtcgaactccttgaatacctcgtaatcggtgtcggcgttgtcggaaagggcacgaatcaccagtgccggcacgtcattgcgggcggcgacctgtgccacggcggcgccttccatctccacggcgtcagccccggtgagtcggatgacctcctcgaccttttggggcgtgtccacgaagtagttgccagaggcgatgatgccggtgatgtgggtaatgcccgcattggcaagcgcctcgtcggcaacttccagcagacggtcatcagagtggaattcctccaccggagcgtccgcagtgccgggcttccactggcctacgagccgcatgtcagtgtcgaggtagcgcagggtgccgccgagcaccacgtcgttgatgtgcaggtgggtgttgaggttgccggcgatgccgctgaaaatcacgacgtccggggcgaactcgtcaatcagcagctgcgtggtggcggccgcattgaccagtcccatgccgcctaccgttgcggcaaccttgatgacgtcagaaccgaaggagtcgaccgtgccggacacgatgtcaaggctgcccttggcggtgtgcgtcacatgcgtgagcgatttggcgatcagtgccacttcttcatccaatgcgccaataatagctacagttttcatacccatacgtaagttcctttcacaacactttcggttccccttgtcaggggagctggccgccgaatggcgggctgaggggtagtcagacgtttcgtcacattgctcccccgagagagccgatgacgcaactcagtgccaacgccgcgtggccacggcttccgcaagctcgcgcagcaaggcctcggtttcttcccagctgatgcacttgtcggtaatcgacttgccatagaccagctgatcaagcggcgcggccttctgattgcccccttcaataaagctttccatcatgatgccggtaataccctgttcgccagctgcaattctgctggcaatattgcgcacgacttcggcctgacgatgctcgtccttgccggagttaccgtgcgagcaatcaacaatcagaccgtgcgaggctgcggattcggcgggcatttcggcgcgtacgtcttccatggctttggccacggattcggcatcgtaattcgggccgtgaatcgagccgcgcaacaccacatggcagtccgggttgccaagggtctcgactgcgcaggcacgccccagatggtcaatgccgaagaacgtgtgctgctgagcagcggcgaagcaaccgttgaccgctgccttcaccgagccgtcagtggcgttcttgaagccgaccggcatggaaagcccgctggccaattggcggtggatctggctttccgtgttgcgcgcaccaatggccccccaactcaccgcgtccgagatgaactgcgggctggtgggctccagaaattccgtggcggccgccaatccttccttcagcacaccaagcaaggttttgcgagcaagcaacaggcctttgcgaatattgtggctgccatcaatatccgggtcgttgatcaggcccttccagccgatggtggtgcgcggcttctcgaagtacacgcgcatgacgatgagcagctgctcaccgagctcgtccttcagcttggccaatcggtgcgcgtagtccagcgcggccttcgggtcatgaaccgaacaggggccgacgatgaccaacaacctgtcgtcttggccgtacaggcacgcgcgaatctcatcacgcgagtaggcgacgattccctgagcctgatcggtcagcgggagttcagcgagcacttgcgcgggcgtgggcagcggctccagctccaatacgcggcggttgatgatgcgactgacacccacctgatcttcccagcgcggcacatcagtggcaacgagcgggttcttcccctcccccatcgcctgacgaatggcgcgaagctcttccggggtgttcaacggctgcggaccgacttgcaacggatgcagcgaatgtgctgcttcctcctgctgctgcataacatctctccttggatcagtatctttcccaaggataaggtgtcacgggaacaaactgacatgaccaccgttattggcaaaaaatgctcactgagtgggtctcagtgagcatttttacaaagacaaagctatttagccgagctgcgagcggtgacggcgtcggctagggtgtgcagcagctcgttggtgcgttcccacggcacgcaagagtcggtgacggactgaccgtagaccaactggtcgagcggggccggcttttggtgaccgccgaccaagaagctttccatcattacgccggtgatgccttgttcgccgtgcgccagacgctcagcgatctcttcgatgacttcggcttcgcggttttcgtctttgccgcagttgccgtgggcggcatcgatgacgaggccatgctggctcgggccggacgctttggaaaccttgaggtcttccagagcttgacgcacggattcggcatcgtagttcgggccgtggctggaaccgcgcagaaccagatggcaatccgggttgcctttggtttcggcggaaatcacgcgaccgtccaagttaatggacaggaagtgatgctcgaagccggccgcgaagcaggaatcggcggcggccttgatggagccgtcggtggagttcttgaagcccaccggcatggacaggccactggccagttcgcggtggacttgggattcggtgttacgcgcgccgatggcaccccagctgatcgcgtcgcagatgtactgcggggtgatggggtcaagccattcggtggcggcgggcaggccgaggctcagcacgtcggtgagcaccttgcgggccagccacatgcccttacgaatattgaagcgaccgtccagatcggggtcgttgatgaggcctttccagccgatggtggtgcgtggcttctcgaagtacacgcgcatcacgatcacgagtcggtcttccagctcgcgcttgacggcagccagcttttctgcgtactcgtgcgcggccttcgggtcgtggattgagcaggggcccacgatgacgagcagtcggtcgtcgcggccgttgagcacatcgcggatttcctgccgcgagtggagcacgagctcgctcatctcatcggtgagcggctgctccctgaggaaggcacgcggcgcgggaatggggtcaagctgacgaatgttgacatcgacggtctcgggaaagacggcctgctcccccaaacgacgttcatcctcggaactatccggaccacgtagtgctgccattgctcgactcctttctttattggttccccgcaacgagttctccaacgagaacacaggatgcggccatgctggcaatgcaataccgcgcatacggcatagcagactcttcactgtaataaccgtacacggaaaaacgaagtcggccgaccgtttcatggaacggtcggccggctggcatcttcctgaacgggcgattggaacacccgcacaggacctgaattatctcttatttattggggaacgtgaacccctccaccgtgacgcggaccaccgatacgcgccccacggcctcgggagtggcgttaatgcgcatcgcttcgcattcttccataatcaggacacccccgacaggcacgacgcatggtacgccttcctcatcgtcattcggcaggccaaaccattcgcgatccgaaacgtcgctgtatgcaccggctggccgcaatgccgtttttgcgcggacatacacggctaacggctcgtcgatgggcgagagcaccgtgtggtaccggcggtgcccgacataacgatcatcagcgagcgcgcctgccggtaccgcccagaaggtcagcgaatcgccgagcgaatacgcggtgtccaacggcagacgggtcgattgcctaatggcttgaccgcatcgcatccatttgcgcacatgagacaatccggtatcgaacatttccaagctgtcgtatagtcgcatcactgcacctccttaccgactgcacccgcaccacagttcggattgcggctgacgtgttcgtcgtcgtgaatcggcgtcagcgtaaaggagaacgcacaatcctcaaatcgaatacggtacgaatcaagcacctcgctaccccaggaatttgatccgagacctaacacgccatcattgatgttgacggtaaccgatccatgaccctcaggcagctcgttcacatgcttggctttgtcgatatcagcgcagctgtacggccacgcggagaaggagaacgcctcggactcaccatcggccggcgccgtccgcgtcaccatcacaccgttcccgtttccgtcgcggaacgttacccagcgggtgccttcgtgattcgcgcaatcctgcggcatcacatagggcgtaaacatggcatccacgtcattcgtccacacgcccactggattggcggcgagggaatccgggtagttctcgcccgggccgtgcccgtaccaagcgacctgcctgcaatcccgcggaatagtgaaggacaggcctcggcgcggaatgatgtcatggtagtcgccataggcggtggcggtcaccgcgacgtcaacatggccgtcggcatgcactgtgtaggtcagtctcgttcgcatgccggccaataccacaggagcggcgagacgctgctcgacctcgatgatcacctggtcgcgttccgcatgccattgaacgccacgagtgtccgtctgcatgacgtccagataatacggcttccagagcgcggagtattcctgcgtaaggttgtcgatcaatggtttccacaggccgaaacatatcggcgaatcaatgacgttccgatcgccatcgctccagttggctatggcaccgagcgccttgtcaaaccgaagcaccatggcaccggcgcgaatggtcagataccgttcgtcttcgacggtggacaatgtttggcgaacgggagaggtcacggcgagcgccgacccatcattcgaacgcaccgggccatagccaccctgaccggcatgcagccggaactggtaggagcccagcggctcatccggatcacaccactcatgctgttccacggacagcacggtaaccgtgagcatcgcttcaccgccatggtgttccagcagcgcttcacggcgcaacggtatgtccatgtgaccgagcgggggcacgggccccacctccagcagtgtcgtgtccacgatttcaccatccacacttatagacacccgcagccgagtgtcggacaaatcagtgaaataccgacgactatcaatgccaagcagagcggtgccatcctcctcggtataggtgcagctgaccttcaccgggcaaatcacctgccgatattcagcaagccccggactgggctcctgccaggggaacaccagaccgtccacgcagaagtttccgccggtggggtaatcgccgaaatccccgccgtaggcataccacaggtcgtccagcccattagggtccacgcctttggcctgcacctcacgctcggccaatagcgccaaacgatcccctctcattgccaccgcatgatcggaccattcccagacaaaatggccctggatactcggccaacggtcgaacacctgctggtattcgctcagcccaccgggaccgttgcccatcgagtgcccgtattcgcagatcacacgaggcttattagccggatgctctccgaaatcgttcatctgggagacacgcgaatacatggtcgacagcacgtccaccgattcgccgaaacgatcttcctcataatgaacaggacgagatgggtcaagttgccggcaccgttcagcagcggcacggaaattgcatccgaatccagactcattgcccaaagaccacattactatggagacatggttgcgctgctgcatcacatgccgctcgatgcgatcgacatagggaacttcccatgccgggtcatcggtgatgagtgcgatgtcgcccacgttttcgaatccatgacattccaaatcggtttcggccatgaccataaggcccagttcgtcgcacatctcatagaaccgcggatcgttgggatagtgtgacgtacgcacggcgttgatgttgtgccgtttcatcatttccaaatcacggcgcacgcgctccatactgaccgcacgcccatgcctcgggtcgctatcgtgccggttgaccccgtgcatggtgaagtacgatccgttcaggtacatcagcccatcctcgacggtgacttcggccagtccgaggtgatgcggcacgatttcgtcagaaccgtcccgcccgacgatgcgcatacgcatgtcatacaggaacggatgttcgggattccaatattcggggtcaggaatattcattacggcacgttcgcccgaatccgaatgcgcggcggacacgatattcccgtcacgcagaatggtccattcgacgcaggactccccttcggtccaagcctgcacggtgacccgtgcgagcgtatcatccacacgatgagtacgaaccatgaagtccttgagatgcgtctgaggtcgtctgaccacatacacgtcacggaagatgccggatgcccaccacatatcctgatcctcaagataggtaccatccgaatactgcagcaccgtgaccacgaacaggttcaaccccgcatgcaccgcatcggtcacgtcgaattccgccgacaagcgagagcccttcgtcatgccgacgtatgtgccattgacatgaatctcagcataactgtccacaccatcgaaacgcagaataatgcgctcaccatctgcagccggctgcatattcaccatccgctggtacacgcccgtaggcgtggtggacggcaccagcggcgggtcgacggggaacgggaacggctcgtcggtatagtgcagacccccatacccgtcaaactgccacatatgcggcacctgcacctcatcccaatcatcggcgattgacagcaacgcctgctgtggcacggtggccgggccattgaataggcggaaccgccatgcaccgctcaggctctgataaccgtatgagcgttcgcgctcataggtagaggcatccgcctcacactcatatccgaagaaataggcgtgcggggcaagacggttacgaccggtcagggagggattctcccaatcgttctgcttgctcatcatgtgatgtactcctttgcgcaagtccgccacatcccgcaaatcggcattcttccactcgtatacgcccgatgacggacgtatacaagtgggattaccagcaatccgaatcgttgcgggtcgtggttgacgcttctgggattaggcgacaatgccgatcagatcggagaaccgttccaagttccatgtgccaagcccggaacgtatggcgatctcgccgaatgcggcggagtccatacctccggcagtcgcggcttgcaaaccggcttcggcgtcctcgaccaccaaacactccgcaggcgcgcggttcagaaattcggccgccttgacgaacacttcggggtcgggcttggaacgggtaatgttcgtaccgtctgaaatggcatcgaagaaatccgacaatcccagctggccaaggatgaatttcgtgttccggctggatgagccgatggcaaggtcaagtcccatggcacggagcttgtgcagtgtgtcggccacaccttccaacatgtcgtcgggtcccatctgtgtaagcatggacttgtatatctcgttcttcttgtcggtccaatgaatcttctcttcgtcactcattgtgccgtcataccgttcgaggatgatatcgaagctggccatacggctcacgccgcgcaaccgttcattcacctgctcgtcgaagggaatgccgagctcgtcggccacctgcttccatgccaggtaatggtattggtcggtacggcagattacgccgtcgagatcgaaaatgatggcttgataacgcatggatggctcctttgctcatttgcgaatgattgtggtgtgtatggcgtgaatcagacgggcaatcaacccgaaacctcgccggatggttcgggaacaggcgtgtctgtgggctgttcgtcttcggaggacgcagccagattggagatgacgaccgccacgaggatgatcgtgcatccgacaatcatgcgtggggtgaccacctcgcctagcagcagaatggagaacagtgtgccgaacacggactccattgacaggatgatcgcggctttggtctcgtcgatatactgctggcaggcggtctgcaacagatagcagatggtggtactgaccacgccgaggtacagcacactccaccatccgtcggtcgtcggcgtcagatgcacctggcccatagccaccatcgcaaccacagacagcacgaatgcggtgaccatctgcacgcagttgagaaccgtcgcacggtaccgctgcacgaacagaccggtgaagaagatttggaaggcaaagccaaccgcgcacagcagtgacagtgcgtctcccaaaccgagcgtcatattgccgttcaacgaaagcaccgccacgccgacaacggacaagcaggcccccagtacgccacgccatccgacgcgtttgcgcagcaccaggaaggcgatgaacggcaccatcaccacattcaatgcggtgagaaatgcgttcttggacggcgtggtgtattgcaggccgataatctgcagcgcgaaggccgcgaacagcgcgatgcccataagcacaccggcaccaatttctttgagattgatgttccggaactcgcgtacgctaataaagctcatcagcaccgcaccaagcaggaatcggatggccatgatctgcatgggcgtcaggctattgagcgcgatatcgctggcgacgaatccaccgccccaaatcgcggtcacgacaatcaggccggcaacggccataccccgcttcatgacacatccttcacgccgggcacggtcacggtctcgccgttgatgcgtaagatggcggacggtccgtcaagcacctccacatcgacaccattggtcgcaccgacacgaatctcgagccacgactcccggttgtgcagacggaatgtcagcgacgaccattcgtggggcatgtggggcgtgatggacaatacgccatcgtcgtccatgttcactccggcgaacccgaacacgaccgtttgccatacgccaccggcattggccgcgtggatgccctcacgggtgttgcgctgcaggttgagcaggtcgagcatagccgcacgtcgcagatagcggtaggccttggaatcgtctccaaccttcaatcccatgatcgcgtagatgctggggctcaatgacgacccatgcaacgtgcgcttttcgtagtaatgatagttggtttcgatttcctgctgggagaattcgttgccgagcaggtgcagcagcatcaccacatcaggttgtttgatgatctgcgtctcgctggttttgaattgcttgagcgccgcaggccgtaccggccagtcgttcttgtcgtattcttcgatggtcaccggctccagatcgaaatagccctcgaactgttcgagcaggtcggtgtcctccttgcggggcaaatagatcttcgactgtatggcatcccacgatgcaagctcggcatccgtcaatccggtggcggcaatcagtgccgcatagtcgtccggatgttcgcgctgcatgcggtcgacgagcgcgattacatatctcatgttccaacgcgccaaatagttggtgtacgtattgttgtcgacgggctcatgccattcgtcgggaccggttacctgggtgatttcgtaacgtccggcgtcttccttccattcgcaccggcttgcccagaaacgggcggtctgcgtgagaatctcggcaccacgaccgtataggaacgaggtatccccggtgatggtcgcgtagttcgcgatgccgaaagccacggcagctgtcacgtgatgctcatagacggccacatagcagcggtagcaggtgccatccggctcgatggtccagtccgggcattgttcgctgccatcatcagcggattcccacgggtattgcgcaccctggaatccgttcttggccgcgttggcctcggctgcgccgagcagacggtaccggtaggactcgaggtgccgggccgtctgggggaacacataagcgaaaaacggaagcataaacagttcggtgtcccagaaggcgtggccgccatattcttcgccggtgagcagcttggcacccacattgacccggtcatcatgttcgttggcggtactcatcaggtggaatacgttcaaccgaatcgcacgatcaagctcaggatctccctcgatatcgatgttggcctgcccccacatcttgcgataaatatcggcatgaacctcgaattcacgctcgaacccttcggcaacgaagtcctcgacctcacggcaggtggtggcgtgcagttcgtcggccggagtgtcacgtccatcgaacattgccacgtatttggtcagcaccacgctgtcgccttcatcggcacggaagtcgcagaattcaacgccttgctcgccaaaggcatggaacacacgattgcccaacacatcccgatctcggcaggtgccttcaagatggctgccgacacccacgtgcagattctcatcacgcgtggcgacctccatatacaccccgttctcaccgagcggctcattggcggtgacaacggtgtgcttgaccttgaaacggggcgcatcatagaagttgatgatggagccgtcggtaatctgctccacttcgattagacctgagtaattgagcggcgtgacccacagtcgcacagccatacgatgtgcatgcgcacggctgacgaaacgtacgccttcaatcagggtttcacgtcctttcgggtcacgcagacgcacccgtttgaccaaagccgcgtgcttcaggtcaagtgcacgacggtattcgaggatctcgcattcgtcgacaccgatgagctgcttttccacgtacaggcggatgccaagccagttgggcaatgtcgcaagttccttcatgaacgtttcggacttgtcgaacaccccgttgacgtacaggtaaggcaacgtgggcttgttcccttcctcatggctgccacgaatgcccagatatccgttcgatagggcgaacagactctcgtactgcaggttgcggtcaggctcataagcgtcctcgctcaccatccagccgtctgttggcagctcgaacccgagtgcggtggaaaacgaatcgcgaatcatggtgtcatactccttggtgcggtttgggcgcacttggcccgggccgagaccgatggcccgaaacatttcgtacgtgggggcatcattcgccccggaaacagttcaggcgaccacaggagtgaccgagcaatggggctcagccacccttggcccgccaacggtattacttgatggaacctgaggtaccttcgacgatgtacttctggccggaaaggaacgcaaccacgggcgggatgatcatcaccacggtgatgcacagcatcgggatgatctgggtctggtgcacgcccttgaacgaggccaagcccaacgccagcgtgtacttgctgcggtcctgcaggaagatgagcggtccgaggtagtcgttccatacggtgatcatgttgagcacacccaccagaatcagacagggacgcatgatgggcatgtacaccttccaccagatctgcaggtcgttgcagccgtcgatgcgcgcagcctcctcgtattccttgggcacgccgagcaggaactggcgcatgaggaagatgtaatacgcggagccgaagaacgagggcacaatcagcgggagcaatgtgttgatccagccgaaagccttgaactccatgtactgcgggatcatggtgacgtcccacggaatcatcatcgtgctcagcagaatcatgaacaggatgttcttgcccttgaagttgtagcgggcgaaaccgtaggcgaccagcgagcaggagagcacagtgccgagcgtgttgagcacggtgacaatcaccgagttaagcaggtacttgccgaacggctgcgcatcccatgctttcgcatagttctcccattgccattccttcgggaacagactcggcggataggcgatggcctcagccgatgtcttgaacgtggagaacagcatgtagacgaacggggagaggaagtagatcgccaccatgacgagcagggcgtagatcacgaccttggaacggagcgacatcttcatcgcgctacctccttgccctttgccttcttacccttcttggccttgttcttgtttgccgtggactcgtagaacacccacgtatcggaagatttgaacaccagcgcgctaagcagcaggatgatgatgaacatgacccatgcgttggcggaggcgtagccgagcttgtggaatttgaaggcgttgttgtaggtcatcagtccgtagaaatatgtggacttcatcggaccaccgttcgtcagcagcatgaccagggtgacctgctggaacgaactgatgattgacgtgatgagattgaacaggatggtcggggtgatcattggcaacgtaatgctgaagaactgacgcgccgggccggcaccgtcgatggcggcggcctcgtacaggtcaatgggaatgttcttgatatccgtgtagaagatcagcatcatcgaaccgacgccgaacgcgctggcgaagatgaccgcgatgatagcccacttcgggtcgaccagccactgcgggccgtcgatgcccagcagggacagcaggtagttgatcacgccgtaattgccgttcagcagccatccgaagatgatggatacggcgacgccggagatgacagccgggatgtagaaaatcgtgcggaaaaacttcgcacccttgaccggctggctgatgagcatcgcgagaaccagggcgataatcatgttgagcggcacgaaaatcgcggcgtacttcaggctgatggacagggacttgagcacctgatcgtcggtggtaaacatctcgatgtagttgcctaggccacggaatttgggggttccggtaatcgaccagtcaaagaagctcatgacgaacgataagacgagaggtcccaacgtgaatactaggaacccgatgatccaaggaaggatgaacaggtatggccaggcccgtttattgacctttgctagcactttcataatggtcctttgcccagatggtcatcacttcagcgcttcggtgatggccgaagcgggatcttcgagggaggaggggttgtacatcttctcgaaggagagggcaagcttgtcggagatctcggaccatcccttgaccttgaagctggaagggctgtagccgtcggactgttccagcatcgagtagaacggcttgtactggctcttgtcagtgatgccctcggactcgaccacgctggtcagcacgggcagctcgctgccgattcgagccttgtttgagtcggcattggcccagtacttgatgaattcccaagcggcatctttgttcttgctgctcttagcgatggagatgccggacgagctcaggatggacacggaatcatggtctgagtcggcgaatgcggggatatcgaccacaccatagttcaggccgtcctcgtctagggtgctgagggcccaggaaccgtagatgtacatggcggtcgtgccggcgcggaactcatcggtgccgttgccttctgtggccaccgcggaaccatccttctccatgtcctggaacatctgataggtgtcgatggccttggcggaatcgatgttgccttcgagggtgccgttctcgtcgctgtaagcggtgtcgttgctccacaggtacatctcgaagtcatacggatcgggcttcatctggaaggagaagcctttggcatcggtcttgctggaaatcttcttggcagccttctgcaggtcggtccaagtccagtcattggtcggcgcttcgacgccggcctgcttgaacaaatccttgttgtagtagagggcgtgcgtagtgaagccgaccggtacgccataggtcttgccatcgtaggagttgtagttccacaacgtggagtagaagtccgacttccagtcggagccttccttttcgatatagctatcgagtggttccagaccgtcggcgtaggacgggtaattccacatgtacatgacgtcaggggtatcgtttgagcccatgccggcgctgatctttgtatcgaagtcggaaccgtaggcctcaagcgtgacctcgatatcgtcatgcgactcgttgaactgatccaccagcgtctgctgacggtccacatcttcggccttatcccaagtggcgaaacgaatctgcgttttgccactggagctatcggtaccgcagcctgccaacagcaggctcagagatgcaacggttgcgcatgcagcaataacggtcttcttcatgtggttcccaaacatcttttctcctttgaaagagtggatggaattatctgtgttatcgacagccataaggtctgacgttttgtgtgacttgcctcattgcttgctatgaagataacagatttcaaaaaaatatgcaaccggttgtcctgtgtgttgcgagacattgggttacaatcgtttcatatagcattgcattactgttgcattcaaaggagaattatgaccgtggcaaagcgcaatcgcgttactttggccgatgtcgctaaagccgcaaatgtctcacgttccaccgcctcgcgcgctctgaacaattctccacgcattagccgcgagaccaccgcacgcatcaagaaaatcgcggatagcatgggctttattcccaatgcacagggccgcgcactggcagtgggccgcaatgagaccatcgccatcctcattaccgagccgctcgacgagcttttcgacgatccgacctatgcgatgtttatcagcggcatcacggagaaacttagcgaatcgtcatatctaccggtattattgcaggcatccaccgatttcgaacgtcatcgcgtgcaacaacatctggaacgacgctcattcgacgcggttatcgacatttccccctacgccaacaactatttgctggaggaaatgtacaaactgcgtatcccttgcgtaatgcttggccagatggaggatcgctcatatgagggtattttctccagcgtctattccgacgacacgtatggagcccaaatcgccgcccaagccatgcatgacgccggacgtcggcatcccatatcgattttgggaccgcgctccaacccggcatcccccgatcggctcaccggctatcgacgtgtatgcggtgacgaactgcccgacgacagggtactgttcaccggatgggatgcgaccgccggcttttccgcaatgatgcaactgctggatacacatgacgatatcgacggattgctggctggctccgatcgtatcgccgtaggtgccatcgaggcgattcgacagcgcgggctaacagttccggacgatatcgccgttgtcggattcgacgaccatccaatcgccgagcgttgcaatcccccgcttaccaccgtgcaacagccgttgcgagaagagggctccacggcagccgaccttgccatgcgcatgattgacggagaggccgccaccaccgtcatcaaacacatgacactggtacggagaaagtcgctgtaaacactatccttcacatcgccatagggcactggcgcgcccgacactcgatatagttctcacgttgactgagacaaccggttgcattacgcttatggaacgtgagagcagacatcgcagtcttttcaatggccttattggccttgtttcctatcatcaaccctgtcggcgcagtggccagcttcgccacccttaccgccgacctgcccaagaaagaactccgttgtcaggcgcggtacacatccctgtatgtgttcgccatattggcggcgtttaccatcctcggctcgttcattctcgacatgttccacctggaactgcccgccattcaaatcgcaggtggttttgtggtggcgcattctgggtatcgaatgctggtaccggcctctgatcatggcgatccggaagcgcatcaagacaatgacatcgcctttacaccgatggcactgccactaatcgccggccccggcgccatcggcgaagtcatcggcctatcggcccggtatacggaacctcgtgagcggctggccatccttatcgccgtattggtgatatccatcgtcattatggcgctgctgcgctggtgcacaccactggtacataaactggggcccggcggcatcctagggcttacgcgcattatgggttttattatcctgtgcatcggcgtcgaactgatgatccacggagtcagcaccctcgccatcggattataattccgctgagataccaagaaggtccggcagagtcaatctgccggaccttgtgttatgcgaagagccgtcggcttttcttatgcaagcgcacccatcggatcccacgcaggcagggaaatcgccggctcttccaaagccttctgatattcctcaggaagcagggccttgggaacggcgacctcgtagacgtactcggtgaaccagtcatcggacatggtaaagtagcccttatcggcaatcttggcgccccaagaattctccacacgccagcgacgggtagtagtaccgtcgtcagccacatccacaccagcaaaggccatcgcgtgatccatggccgagtcaccaaagcgcacgcgctgctccttcgacaaatcaaagcgcacaccgtacacacgatcgtactcaaacaggtcagtggcccaagcaccggcctcacgatccatcatcggtccgcactcagcaccgaaccataccggaatgccctgttccaccagcacgcgacggacgcagtccttcatgaactggttcggcacgttgagatactcagtggcgtcgccaccgaccacattacccaaatgctcgatggctattttgcgtcccttcggatgttccttacgcggatcgtccaccagacacacatagctttccaaatcggcggaacccacgtacttcttccagaactcgaccggcgtgatctcgccgtcacggtggaactcgtcgtccttgtcggtccactcccagtcgaaggagaccggcggctcgcccaagtgaatggtaagaatgcggtggccagcttccgtggcattcttcacgatctgatcgatattctcggggttctcatacatatgcgcaacggcctgtcgcagcagcttgcacaacttgttgttcattgggtcggtgttcttggaggactcggtctccgggaacaaatccttgggcacggcaccgtacttcttgtacacgttcatggccatagtccactgaccaccatcacccatgacttcacgcagcagatgctgcaccagacgggaatcttcaggctccccggcctcgaccaagcaggccatatccttgaggaagtagttgactcgctccagcttgtcgtagtacatcgcatagttctgggagaactcgaactgctccaggttcatgttcttcttggccacaaaacgggccacgttcaaagagctgaacagccagcaacggccggaacgatcctgatgggtagcctcaccattgtccactatcgtggaaaaacgacgctgcaacagacgggcacgatcatagttcttggcaaccttgtcaatgcctgcggcggtcaccgcgttcatggcaattcggttcgtctcatctgcggtaaacgaatcgcgcaacgactgcaggtcttccacactcagcttggtgatttcggtcaatcgatactccttaccggttttcccttgtgtatatcagtctccgtcttcattgaacggaacgcctgcttgagggagcgcatggcgtacggctattatggcatcttttcgacgtttgtgcaaccggttgtctattagtgtttcgctacgatatggatcggcattcccggcttttcgggctagctcggagtgctctccgagcccaacaatcacggactcgcctacggcgagactcaatcctaccttcggcgtccctcacggtcttacgaccgcgagccaggcctacgaacagcccaccgggctgttcgcttcacggcctgtcgcctcaggcgcgctgatctttcaggccaaagctctccgactgactgcctacggcagactcaacatcacctcgccgctgccgcggctcggcgcactcgcgaaagagcccaccgggctctttcttatgcgagtgcgcccatcggatcccaagccggaagcatggtggctggctcttcgagggccttctggtattccttgggcaacagggccttcgggacggctacctcgtagacgtattcggtgaaccagtcgtcggacatggtgaagtagcccttgtcggcgatcttggcgccccaagagttctccacgcgccagcggcgggtggtgccgtcgtcggccacgtcaacgccggcgaaagccatggcgtggttcatggcggagtcgccgaagcgcacgcgggcttccttgtccaaatcgaagtccacgtcgtacacgcggccgtactcgaacaggtcggtggcccaagcgccgttctcacggtccatgaacgggtggcagtcggcaccgaaccataccggaatgccctgctcaacgagaatctgcttgacgcagtccttcatgaactggtttggcacgttgaggtactcggtggcgtcgccgccagccacattgccgaggtgctcgatgccgatcttcttgcccttggcgtgctcggtgcgcggatcgtccaccaggcacacgtagtcctcaagatcagccggacccacgtacttcttccagaactcaaccggcgtaatctcgccgtcgcggtggaattcgccatccttgtcggtccattcccagtcgaaggaaaccggcggctcgcccaggtggatggtcagaatacggtggccggcagcagtggcgtcggcaataatcgcctcgaccttggaggcatcgccgtcagcggcgtacatgtgcgccacggcggtgtgcagcatgtggcgcagctggatgttcatttcaccggtgttcttggaggattcggtctccgggaacaggtccttgggcacagcgccgtacttcttgtacacgttcatggccatggtccactggccgccatcgcccatcacgtcggcgagcaggtgctgcatcaggcgggagtcggaaggctctccggcagccaccagagcggccacatccttaaggaagtagttgacgcgctccagcttgtcgtagtacatcgcgtagttctgggagaactcgaactccttcaagttcatgttcttcttggccacgaaacgggccacgttcagggagctgaacagccagcagcggccggagcgatcctgatgggtggcttcgccattgtcaacgatggtggagaaacgacgctgcatcagacgagcgcggtcataattgcgagccaccttgtcgatgccggcggcggtcaccgcgttcatggccagacggttggtgccgctctgtgcgaaatcgccgcgcagggtattcaacgcttcgtcggtcagaggcgtcaattcactcatgtcatactccttctgtgatggtgcgcttgtggcgcagattcaaacgaatacggcacctggctcgaaagcgcaggtgccgtaattcttaccgctagtagtctaatcgaaggcctgtcattcgccgttctgctcagatacggccggattctcctgagtcggggcctccggttcgccctgtgtctggtgctcggacggctcagacgattcggactgctcattctgcgcagccgaatcagccgaatcagccgaatcagccggtgccgcatctgtctcattgtgatcgtcggcagccgactcgtttccgctcaactcacccggctggtcatcggcctcgttgtgtacaggcttgacttccgggacgggcgcaaccaccggcaatgccgccgcggcagcggcttcctgatcctgaccagaggccgccgcattaccgccgaaagcgaatccggagaacgcctgcgagaacatagaacgcagttccgaaacacgctgggtgatgacggactcgcgttcctgcagatcggcgatgcgcttggacagaccgtcaagctcgctttgggcggcggcgcgacgctcctcgatctgcgcatcggcttcctcgcccgccttatgtacgattgcggcggcctggatgtccgcctcctcgcgcttggacgcggcatacgaatcggcttggtcgcgagtgttcttggcctgaccgaccaactcatcggcttcccgcttggccgccacacgacgctcttcgaggtgctgcagcagttcgttgaccttcttcgtggcctcatcctgctgagcggcgatgtcgtgacggatctgctcgacctcggcgttgacctggctcatcgtgctggtgcgcttgacctcggcctcatcagtgatttcctgacccttggttttggccgcatcaatgatttcgctggccttgcgctgggcttcggtcatcatcttggacacttgctcgcgcacgtcggcgagcttcttgttggcctcggcgagcgccgcctcaatctgatcgttggaatcagacttaagcttggtgatctcctcattggcgcttttgcgcattgcggcaacctgctgggtcgcctccgccttcatgtcggcgatttcgcgctcttgagtggagcgttcggaagccatcttcttagtgtgctcttcgcgcgcgttgctgagctcaagctcgacggtctgacgctgttcggtgatggtcttggcagtttcggagcgcagttgtgcggcatcctcgttggcggaggtggtcactgattcggcttgattgctggcgttcgtcagaatcgaggcggccttggcattggcgtcgtcaacaatatgctgggcatccagcttggcgttgttgatcagtgtttcggcctgagcctgagccgtggtacggatggaggacgcgtcctgcttggcgcgttccagcagttcggtactcgtctgttcggcggaggcaagcatctgctgggcgttcgctcccaaggaagcgaagctgttgccttccggcttcttgttcttctcttcctgaagttgggcctgcagttgcagaatacggtcgtcatccgccgcaatctgctcacgcatgctggccaacgtctgctgcgcacgcttcatactctcctgagtagcgtcgaaggcagcatcaaccttctccttgtcatatcctcgcagcaccaccgggaaacgatccaccatcgctgtttattcctttcgcacacgcataaagctcttggcacatccttgaagcactgtagcgcatcgcaccagcgctgagcgttgagcgacgcgcaatcgttacaatgcgtgcgaaccatgttctattccggcgtggcgcacagcgtgctaggcgatgaggatgtcggagctggagggcttgagatagtagcgcacggcttcgcgcaccacatcacggccagcggcgatctgctggtcgagtggtagaccatgctggctggaatgcgccggaacgaccggagggaagctgacgaatccgcccagcacctgctcctgggtggcggtccagttgagcaagttgtagaacagcgaattacatacgaacgtacctgcgtccgaactcaaggtggccggaatcgaatcgtccgtgaaatcattcaggatcgagcgcaacggcaggcgggtccaataggcggccgggccattgggatcgatgggttcgcggcgtgggatcacgttgtccgcgtctggcttgatcgcgtccatcaggttggtggcgcatcgttcaagcatcacgcctcgggctgcgtgcttgagcccggtggcgatgacgatattgggcttggtggcctcaatcgtctctttcagcgtgggccaggctttggcgaagctcaccgggatgctgacagcatgaacggtgacggcgacctgctccaacggatcgtccggagcagaggagacgcccagtccctgctcggcgatggccttgggcacttcgacggcgggattgacctccacgccgtcatagtggtcgaagccggagatcacaacattgagttcacgcataatgccagtctagcgatgcatctggccggccgcttgggccagcagggcgtgcatgcgggcgcgggcctcttccttgggatcacgaccgagaatctcctcggcgatacgctcagctgtgggaatatcttccagcgtggtgatcttcaggttggtttccgcaccggagacaatggcgacgggttcatcaggcagataatcgaccactacgcgcgtgtcgtcggtgggatggaagtccgggtcggcggcagccaaatcgtaagcgtgacgaatcgtcgcgaagcggaaggattgcggggtctgcgcgcggaaggtgttcgggcggtccggcaccgacttgaccactttcaaatcgcccagatcctcggtcaacagcacggtgtcggttgaggcgtaggccacggttgcggccgtgaactggtcgagcgcatcaatcgaaccgtcgatggcggactgttccacgaacggacggacggcgtcatggatcagaatcttggcatcgtccggaatgccagccgtagccagcatgtcgagcgcggtggcggtactgtccacacgctcgtcaccgccgtcaatgatgacgcggaccttggtgtagcccatctcgccaaccaacgtttccacttcaccgcgcaccttgggattgaccaccaccacgatgtcgctgacgcggtcgcaatgttcaaaggcatcgatgctccagcacacgatgggcttgccgcccacggagacaagctgcttgggattatcggggtcgaagcgcgtaccgaagccggcggccagcaccacggccaccaccggcacggtttgcgccggtttggcaccctgagcgggggccggttggacggtaggcgtctcgacgggggtatcgaaatctctctcagtcataggcaccaccgtaaggtgagggctggccgtccgtgaactgcatcacatcttctccacggaatgtgctcgcattctccgtttagtcacgcacgatgagggcgaggaggcggccttcgtgtgttttgttggcgagcgcggcgcggcggtgcgagtaccacagtgggttttcgagcgtgcacatgctgtggctgatgttgtcgatgcgctccgcgagctcggccgggccttcgccgtccgtacggcacagttcggcgagttccgggtcttcctcaaggtactgggtggcggcgtgcacgcgcggcatcgaatcgaccacctgatgtacaccggcgaaggcgaggtcgatcatcgcggcttcggcgatgtcgatgccggcaccgccgaaacgggtcttcgtcttggtcagcgggaagcgcttgatgaactggtcggcgatctcgtcgcccacttcatagcagtcgccgcagatgcgcgggccgagtgtggccacgatgttcgccgggtcggcacccttgctcttcatcaggtccaccgtggcgccgatcacgccgcgctccagaccacgacggccgcagtgggccgcaccgatgataccggtgaccgggtcgcccagcagcaccggcagacagtcggccgcgaacatgcctagggcgatgccggattgtgcggtgacctggccgtccgcctcgatgacgtgcggagtgtcagtctcaccatgtgtgccggacacgtcgaagccgaagggggtgttgatgacgaacgagtcgtccacgtccacagccacgccggaatgtacttgggagaccagcgataggcgggcttgcaccgcttcggcgagtgcgatacggttcgacagcacggcctcaggttcgtcgccggacttgccgccgaggttcaggttgccgtaatcgccggcgctcaggccgcccagtcgcgtggtgtacaccaccttgatgccgggggccagtgcgatggggatggtcaccggaatagggcgaccggctttatcggtagagctgatgctgttggaatcgaggatttcttcgctgtattcaggcataaggcattctttcttgggtgcgggcggtgttcatgattttcatgaccacccccagtcagcgggggcggagtggtaggttattcggctttgagggtgggctttttggtgcgcgagcggatggcggcgttgatgggcacctggtgcgggcagggcatcgagaacacgtgcgccggattattgatggcgggtactggcgcgccatcggcatcgcgcaggccggtttccggcacggtaaagaccaatggtctctcgccaggcagcaggaattcgacctgttgaccgggctcaatcttgttacggctcatcagcgtgacacgtccgtcttcgtccgcgctccagctcagcacttcgcccactaccagccatgagcggaagtaggcggagcggtcggtgttctgtgtgaccttgtgctccgggtaatagaagccggtggagtagtcgcggtgggccaccttgtcggtttcctcgagcagccattcgggcagttcgacgtgtggggccgggcgaacggccgcatgtttccaatcggtctcaatctgttcgaccgcggtgttggacttgcggcgcgtggaacgggcgtgagagctcatgccgtcgggttcgacggcggtgccggccggcgtaccagaggcagttgagtcgacggcatcagcaaccgtcacgcggtcacgttctgcggcaaccgagccggtgaccgaatcggcaaccgcagtatcagagccacggtcatatccctcatcggccacaccggcgaacgcggcatcagcattgcgcatcacttgatcttcggttccttggccaaaatcggggtcgcccgggcgaatcacacggtcatggaaaggcttcaaaacattgccatcagcgtcttcaaaaccgcgttgaatcatgtattcattaaccgcggttttgtaggcgttggtcatggcggcgatatagtaggcgcttttcgcgcggccttcgattttgaggctggtggcaccggagtcaatcaaatcatccaagtgccccagcatattcatgtcctgcgaattgaacagataggcgccgttctcggtctgctcgatcgggaagtactggccggggcgcttctcttccacgatcgaatacttccagcggcatggctgggcgcattcgccgtgattgccatcgcggccggtcagatagttggagaacaggcagcggccggagaaggccatgcacatagcaccgtggacgaagcattcgatgtcgaggtcatcgggaatgttggcgcgaatatcacgcacggcctgcaagtccatctcgcgggccaacaccacacggcgagcaccaagctcgtagaaggcgttcgcagcctgataattagtcacgccggcctgggtggagacgtgcagttccagattcggagccacctgacgggccatcatcatcacgccaatatcggagacgatcagcgcgtccacgccggtgtctttgagctggccgacgtactcgcgcatggcttcgatctcgttgttgcgcggcagcacgttgcaggtcacgtacacgcgagcgccgcgttcatgggcgtagcgcgatccttcctcgaaatcctcaaggctaaggtttttgggggccgatcgcatgccgaaggctttgccgccgcagtagacggcgtcggcaccataatcgaccgcggttttcaggcccctcaggttgccggccggggacaacacttcgggctttttgcgggtggggaggttcatcgtcgtattcatcaccgcaatagtgtagtggtggccgtgtaatgcgggaggggctaccgttaggctggatgacatgaagatcgatatcgtgagcgtgttccccgaatactttgaggtgatgaacctcagcctgatgggcaaagcccaggccaagggattgttggagatcaaggcgcacaacctgcgcgactggacccacgatgtgcatcattcggtggatgatacgccagtcggcggcggggccggcatggtgatgaagcccgaagtgtggagcgaatgtctggacgaactgctgggattctcgcagccgtccggctcccccgccccatccggcgcaccggtgctcatcttcccgaacccatcggccccgttgttcacccagcgcgacgccaccgagctcagccatgccgaccatctgctgttcggttgcggccggtatgagggctacgatgcgcgcatcccggactactaccgcgcccagggcgtcgacgtacgcgaatattcgatcggcgactatgtgctgaacggcggcgaagtggcggtgtcggtgatgcttgaggccatcacccgcctgatgcccggattcatgggcaacccagattcgattgttgaggaatcctacaccggcgagggcgcactgcttgaacatcgccagtacaccaaaccggccgtatggcgtggtattgcggtgccggatgtgctgttgtccggcgaccacggcaaggtggaccgttttcgccgcgacgaagcgctggcccgcaccgccgagattcggccagaccttatcgcggcactggattgcaaggcgctggataaggccgaccgcaagaccttgatggccttgggctgggaggtctccgccgcccatccgcgccggctcgccgattaattcaccacacggggggagattcactacgcggcggaatcgtcggaacgctctatatccgagtcgtcatccgcggattcgatgtagaagacggcggtttcgccgtagttgcggctttcggtgatttgccagcctccgggggcagtgggatcatccgagcgtaccgagcgttcgagcatgatcaccgtgttctcgttggtggcgctgcccgccgccagatcggacagtagctgattgcattcagcggtctcataggcatagggcgggtcgatgaatatcacgtcgaatggttcgccgaagccgccagccacttgctcggcttttttgaccagcacacgggccttgagcgaagcatcccacgaacgattcttctgtagctgcgccaaggtcttggtaatcagcgccgccgcaggccgggaactttccacggccacaagttctcgcgcgccacggctcagcgcttcgatgcccaacgcaccagtaccggcgaacaggtccagtacacgggcatcatccagcactccccatgagtcgaggtgcgagaaaatcgcctctttggtgcgatccgtggtaggccgggtacccgttttcggcgtagcaagcgccacacccttgaatcgtccagaaattacacgcatagctttcactgtacaggttcatctgcgcataccaatcatgaacaacaatggggtgctcgaagcgcaccaatgatatatgcacttcgagtacctcatgtacgaatggtcttgcctccactgaagcacattcgagggcttcccgaccgtgatttcctcacgatcggcatacggaaaaactatatcgtgcgattacgggggcgcagccctagcctcagctggaggtgcctcagctggaggtcaggaaggtttcgttgcctcgggtgaagtcgaggacggcaccggcgagttggacctcacctgccagttcggggtcggcggccagaagctgcccggcacgggtgcgggcgtcggcgatcatgtcggcgtccttgaccacgcgcaggagcttcaggctggacttgccgccggattgggcgtcgccgagcacatcgccggcaccgcggaattccaagtcggcttgggcgatttcggcaccgtcgagcgagtggtgaatcacttcgagccgttgctcggccggggagccgggttccgcacgggaaataaggaacgcccacgagttggtgccgccacgccccacgcggccgcgcagctgatgcagctgagagaggccgtatcggtcggcatcaaagatgacgatgcagctggcctgcttgacgtccacgccgacttcgatcaccgtggtggacaccaggatcggagtctcgccgccggcaaaatcggccatgacctgggttttgacgtcatccttgtcgcggccggtcagagtcgcaaaccgaatgccttggaactgtggaagtttctgcaaccggtcggcgatttcggccaccgcatgcaatggcgggcgagccacggtttcgccattttcgtcgaaggtttcgtaggggtcgtcgatgccgatggcatcggccgccgcgcgcgtcgcacggccgcccgcagctgtgcgggcactggaaccagatgctgcggcgcgtccgcgggcagaaccggctgctgccgaaacgccggaaccgccttcgttctcctcatcatccgcatcaatgcgcgggcacacgatataggcccgctcccccgcgtcgactcgcgcgcgaatgtgcgcgaacatacgccccatggtggcggcgtcggcctcattgaccaccacggtacgaatcggtttgcggccgccaggcaattcggtgagccaggaaatatcgagatcgccaaaccaagtcatggcggcggtgcgcgggatgggcgtggcggtcatcaccagtagatgcggcgtggtgccgtcatcggttttggcgttgaggctttcgcgctgttccacaccgaaccggtgttgctcgtcgatcaccaccaaggccaagtgcggggcttggaaggtcttggaaaacgccgcgtgcgtggccacgataatgcccggctcaccactggcggccgcagcgagcgccttacgccgggcggcaagcttcataccaccggtcagcagggtgacgggaatttccgcagtcaccttggaagaagagaccgtcgaagcaccggacgcgcccatcgcgccctcaacgtcggccgcggcatcggtctccttggcacccggctgtgcaagggtcaaccccgacaccatcttgctgatggtctcgtaatgctgttcggcaagcacctgagtgggagccaccagcaccgcctgatagccggcgccgaccgcctgcagcatggccgcgagcgccactacggttttgccggagccgacttcgccctgcaacagacgctgcatgggccagtcacgttcaagatcggacgcgatgtcgtccaccacctgactctgcccggctgtcagtgtgaacggcaacgatgcgatgaagcggtcgcgcaaattgggcaaattgggcagatcaggcagatcggtcgcagaaccgcgctccgatgcttctggttgcgtacttggctccgcaaccgcttcgcccaccgacgctcgagctgtttccagcgcctcgttcagcgggcaaggatgcgccgatgacttgtgcgcgtgctgtcgagacttcagcagcgaggtctgcgaaacgaaagcctcctcatagcgcagggtttcgatggcctccttgaaccgggccgtggaggccggatcatgaatggccaggaacgcctcagcccgatgcatgaggttcttggccttgcgcaccgattcgggcagcacatctgggatggattgggagagcgcctcagcaccggattcggcggtcgtgccggacttctcttccccgttttggacggcgatggtgtcagtcgcgggagccacaatgccggctgccccagcgccagcgagttgcccgtcaggcgtggatgacgtgcgggcccccatcatccacagcaatcccagaatcgtctcatgaatatgttcggacgagatacgcgaactggcgtgatataccgggcggggccggcagacgcgggtaagcgcctcttgcacggtatcggcgtcgtatttcaacgcggccccggaaggggcagtcgcggccggcggatacgcggactgcgcactggcatacggatcggcacttcccgcaaacgcaccattgccggatgccgcgccccgagcgtaaccctcaagccccgctcctgctccggccggcacgggcgcgacagtgaggatttcgggatgggtgaactgcagctgacccatgtattcgccgggcataccggagaccaccacagacgtgccggcgcgcagtcgcacgctgacccaatccacatacgatttacgatacgagaagaacgtgagccgggccgtactgccgggtacgcgacgagaccgggcgaagtcggcgtcatcgaccgtcgcttcgagtcggtagccgcggcgagcgttcatcggcaccacgcgcatatctcgtatcacggcggcaaatgccatctgctggccgggtgcggcctcgcggatggcgcgaagcggcaccggttcggtgacgcggaaaggatagtaggtcagggcgtcgccgacagtgacgattcccagcgatttgagcgcggacacgcgacgcttgttggtgaccagcgaagcgagagtggtgcccatagtgatgctcatattggcctattctattcgcacggcctctttaggccgcagaaacaacaaaacccgccaagccgaagctcaaacgggttttgctccacgttagtacgcgattcacgcggccacgcgctgaaccttgccagccttgaggcacttgacgcacacgcgcaggcgagtgttctcgccatcaatcgtggtgcgcacagactgcaggttcgggcggaagctacgcttggtacgacggtgcgaatgggaaacggtgaaaccggtctgcggtcccttgccgcacactgcgcaacgagctgccatgatggactcccttaaccttgatgtgtcaagtctttcacgcattcgaccgccggtttcacccgacatgccgaacacacaacttcacaaatatatagcccaataccgacaaccgcaactcttgcgtgtatcatgggcgaacctcggcggttcacgcgcggttcgagcgtaacttgcgagtgggccatcagcggttcacgagcggctcggcattggttcgccagcggtccgcaagtagttcgtcagcagttcgccagcggcgaattacgctgcaaatcatagcgtttacccgataaaacacgccggccttccttttccgcatccagcaaactctcatataatctcggtataagagacggcaagggacgaaggggtcctcgtgcaacttgcgacgtgcaacttacgacgaaggaggctgtcatgttgaatctcaagcgaggtatcggcactcacgagcccagcgtgatttcactggggcaagtctgggtggacattatgctcaatgtggacaaggtgccggcacagggcggattcgccgtggccgatcatccgaagccctccattggcggcagctatcgcgtgctgcaggcggccagccgcatgggcgtgccgaccgagcacgccggcattctgggcaacggcctgtgggcgcatttcatccgccagtcattccaagacaacggcattacgcatatcggccaggatcgtcttgatgaggattccggcttccgcgtggtgctgagctccggcgcgccgaagaagacattcatcgcttcctatggcgccgaggctcatggcgactcggacacgttcgacacgctggagccgcagcccaaagacgtggtgcacatcagcggcaacacactgatggaccacacggccaccggcgtggacggattcctgctcaaggccggtaccgacccggctgcacgcgactacacgctggtgatcaaccccaccaatacgttgcgtttggtcaacgaccatatgcttgaggacctggtgctcgcacgcccggtctggtcctgcaaccgtcaggaggccatgacgctggccgagcgacttggtgcgccaatcgacgacagcaaagtcaccattggcggcggacttgacgacttcatgcaccagttgtgcgacggcttgggcgctacactgcgcgcgccgctggtggtgcgtgtcggcgcccgcggcgcttggattcgtgagccaggtggcgagacgattcatatcgagggatacccgaccaaggccgtacacacccgttcggcgggcggttgccacaccggcgcgatgtgcgcgatgctggcaaagggccatagtctggccgaatcggtaaagatcgccaacgcggcggcatccatcgccatccagcacagcctcaacggcgtgccgcaatgccccgattacgacgaggccatcgcgctgatcggcgaatagtcgactataggtagctccccccagtccgcttcgcggccagctcccctcagcgaggggagctatttttgctctggctccccttagaaagaggcccggcattattcatccgccgttcaaccggaatggctcccctaccctagtccgcgcttctacgatagattgagttgaatactgtcgaggagtgtatatgactgatcccacgaatgtccacgaaccggtgccgcaaagcgccaaactgaccgcccgcgagaagaagtggatcatctacgacgtcggcaactcggcattcgtgctgctgtccaccgccgtcatccccatttacgccaaatcgctgatgccggcggacggcaacatcgtgtccgcctggggctacgcgcaaaccattgcttccttggtcatcgcgctgctcatgccgttgctcggctccatcgccgacgtgcaaggcatgaaaatcaagttcttccttggcttcttcggcactggcgtggtcacctgctgcgcaatggccctgcccctgacctggctaccgttcctagtcgtctacattctggcgaccatcggcctcaacggctcgctaacgttctacgattcgatgctcatcgacgccacctcgaacgagcgcatggacaaggtctcctcgcatggctacggctggggctacatcggctccaccgtgccgttcatcttctgcatcgcgctgatcttcggcggcccgtcgctcttcgactggtccacggtggcttgcacgcgcgcctcgttcatcatcaccgccatctggtgggtggcattcaccatcccgctgcttaccagctaccgccaagtgcactatcgcgccacccgtgaccagctgggctcggccgtgcgcggcacgttcagcgaactggcgggcacgttcggcaaaatcgtgaagaacaagccgttgtggatgttcatgatcgcgttcttcttctacatcgatgccgtgaacacggtgatttcgatgagtacctcctacggtgccgagcttggcatcgactccacccagctggtggtggcactgctcgtcacgcagttcgtggccttcccctgcgcgattctctacggtcgtttggccggccggttcggctgcaaggcgatgatcacggcggcggtcgtggcatacatgtgcatcgtgttcttcgccgcgttcttcctgaagtcggccgtggagttctggattctggcgattctggtcggcatgttccagggcggcatccaggcgctttcccgctcgtactacggcaagatcatccccaaggatcacgccaacgagtactacggcttctacgatatcttcggcaagaccgcctcgatcatcggcaccttcctagtggccaccaccacgtccctgaccggcaacgcctcgttcggcgtgctgtccatcgccgtcctgctcgtcgcggcgctcgtcttcctgctcctgcaaaaggacccaacgcaagcgtaatatcacccatcaatcagcaacaggaacgccgaagcagcgattaaaacggcagaccctaccgcccgagccgcgacctgaaacaatttagccctgcacaacgcacatattttgacagggcggtagttgtcgcaaattctgcgacaactaccgttggtaaatcgaacgctataatcagaagctttcagatgctgagttccatgcagtatcccctgtgaccgcaatgcgggcaggtaagcttgcgcgtcttgggcgtgtgtgcggcgaatacgaactctcgcatacccggctggaaggtctcatggcaagccggacataggtactgcacgcgggagcgatagtacttcaccgccgcaacagtgagcgcaatcgccagcagaacggcgaccggcagcggccaccatacatctgtcatcacaccgatgacgaggcatgcaatttgcaacaaagtcgcgggcaatgcgattgccagcatgaccaaatatgtggtgcgcagggaatgagtggttgtggtgttcataacggttgccatgtcggttaatgttgacgatacgaagtcagacgccgagaccgtcagtgctttgcgcagctgcaagcagtcatcaagacgttgcttctgctcggcgatacccgactgcaaggatgccgtctgctgatccagcaaatcaaccagcacccgttccggccgctcgtccgacagaatcgagcgaatctgctccagcttgaagccgagtcctttgagaaaaaggatgacacgcatccgctcgacctctgcagccccatacagccttcggccgccgtcgctgatctcattgggaatcaacagacctttggcgtcgtagtactgcacggttcgcacactcacaccagtgagtttggcgatgccccctgtggtgtatcggctgtccgtttcatcgtccatcgacatggcctaacctcctttcaccaagcaatatgccgcattacgcaacgtcacaagcaacatatgacgcaacgtcgaccacaaaaccttcacatataagcggactgtagaaagacatccgaccatcgcaattgtgcactggttcacagtgagtaccccgaaccagttagacggcagaacagaattacagccacacctgttcttcaggctttacctcgccgaccgcattggccacacgtatggcatcattccgactcaatctaccggtgaatccctgtagatccgaccggaggaaccgcacctgcatgcgatacacgtcgaagacatgcaattgctccggaaccggcatcaattccggaatatcatgattattcgccatcgcgccacgccttgggcagtacggcaacaccatcggcgccccggcttggattcaacaccatggcgttcggcacttcgaccaccggatatccctgttcgtcgaccccacggtacgcaactccattggcggcaacatgtcccgcgcgaggcagcacgggttcaggcgccttcacctcgaacggaatacgacgctgcgacaccaactgcacgctggccatattcacgaacgtattgaaattcaatcccatggaatcaagaatggcgttcacttcagctttgagatcatcatccatgcgaacagtggtagtgctcataacgaatcctttccaaagccaattgtattactaatgacttcttttctcaatataatccgtaggatgcttaacgcttttgcatcatgaccttgacatcgggacaatcccgcgtgataccaatctctgcctttgcgctcatcagctggggagctcacggtcacactcatgcgtcgcagaccacgagcctcacgcgcctcctcattccacatctgtgttaacaacatgtgttaatcgcatgcatcgccaccatgattccccaatgatttcaagggttccccggtctcactattgtttcttccctaaaacggcctcaatcatcggcaccttcctggtagccaccaccacgtccctgaccggcaacgcctcgttcggcgtgctctccatcgccgtcctgctcgtcgcggcgctggtcttcctgctgctgcagaaagacccgacgcgaaactaactaatttgcgacgcgcaatcagcgctcgcgataatccttgaacagttggatggcggtggccgcgattccgcacagcacgccgccgataggccatgcgacccagaacatgcctgtaccggcggtcgaccaatcaccgcgcagagcagctgggctcaggaacagcaagcacaggccaatcagcgtggctatcatcatgatgatgccgcataccgcgccggtcagtctggcgtagaaatcctgctcgcccgcatgctccttgcggtcgtcctcggccgctttgttgtatgcgttgatattgagcagactgtatctcatgccgcagtagacaaacccgaaaacaccgggcgcacagagcagcagaaaaattgcgttgggccagccatcggagacgccgagcatgtcatcggcatacaccgtcaccgcaatgccaatcagaatagccgagatgccaccgacgatgccgattaccagcagccgcaattctcggctgcggtcctccccggtgtagaaatcttctacatatgggtgacgccgtttgaagtcaatacgcgacagacctcctggaatcagcatcgccagccccgcaatcacacccacgcagacgcacagaagcgtcagaaaatcgttgagcggcgtcgctccgagaatggaattgctggaatcgaacaggttgccgatgccaaccccggcgacaatcgcagcaacaccgccggcaatcagcagcgcgaatcggcggcgatgttcatcgtagccagtgatatcctgcgcaagctccgcgataggagcgattatgcccgccgttttggaagaagcggctaaaggcgatgccgtctcagccgaggagtcaacattcgacgaaccggccgcagaagccgacgtggcaggccgactcacatcgccaagtaccagatcatcaagcgtgcagccgaacaggtcgcagatcataagcagcttgtccatctcgggataggccttttcggattcccatttcgaaatggcctgacgcgagacgccaagcaacatggccaatcgttcctgggtcaggttgcgttgcgcacgtaggtactgcaggttagcgcgaaaactcattggaatgtcccttcatacgtaatctttatcatgtcatgttcggccgatgggctcactatggcatgccgtccatgtcacccgccaccatctttgggttgcaatcgccggttattcgagcgcaaccacaagttgcatcggcggaattccgccattccgttgacctgagcagctttaacatcgcactccacgagaccgaagcttttccagccatgcgagggcagcttgtctcacctgccaccacgaatccgcttcgacccacgtacacatctgtgtacagcagcgctcgcaatcggttacctacgacccatatgatttgctgagcgaccgcaaaacacgcaatagccgagacaacaccgtcagcgttaaagcttaaggcgactacttgcccaatagtccggaaatctggctgatgatgtcagcgggcagtcctgcttgttcggcaatggatccgaggtccagattggcaccctgctcctgaattgcgccagcgacctgactgatctggtcggcggagatgttttcctccgccagcgcctgcagctcgtcaagtcagtcagcgttcaaatggtcgccaacgacctgttgatttcacccaactgatcggcattgaaatgctcaccgattaccgccggcaaatcaccaatcgaaccgagattgaaatccccgccaagcacattgcctagattgtctgcggcaaaatttttcaggctatcgaacagtcccacatgtgccgctggtactgcttgttcagcaactgctgcagagcatcgcacagaccctgcatcaatcgccgctcttcggcagacaagtcccgcatgaaaccaatctctgcctttgcgctcatcagctggggagctcacggtcacactcatgcgtcgcagaccacgagcctcacgcgcctcctcattccacatctgtgttaacaacatgtgttaatcgcatgcatcgccaccatgattccccaatgatttcaagggttccccggtctcactattgtttcttccctaaaacggcctcaatcatcggcaccttcctggtagccaccaccacgtccctgaccggcaacgcctcgttcggcgtgctctccatcgccgtcctgctcgtcgcggcgctcgttttcctgctgctccagaaagacccgacgcgcgcaaacgtgctgagacatcgccggtgaaccaagttctgcctttttaccgacgccagctcgcataagcaggaatcaaacgtcggcgctgggacacagaacgggaatccgccgacgttcagagtatctgatgtcggtgccgggccatgtcttggacgccaccgacacaagtaccactcttggcgacggtggtggggcatccgctgtcccaccaccgtcgccaatcgttctcagcggcgttgacaatccattatctgtcctttcaacgccgccagacgtcaacagcttcggcgacggtccggattttgacgcaccaccgatgcaaaaccattgcaggcggtccgtacggaacatcagccgcgaccaccgaacgagcaccaaatgcggcatcagccgcgacaccagccgcacttatcgacgcgcccttaccgcgtcatcacgtccatcaatacaatgactcatcggcatatccggctgcagcccaataatcgtcggccgatagcgagcgattgaaaccggtggcatgatcgcttccgaggtcgccctcgccaccgaaatcgacatcgaaatcagtaccagcatcggaagtaccgccggacataccggcaacggacccgacttcggttttcagcaggtatttctccgcgaaattcagcgtggtgcacaccatcgcaaacccctttccatgcgcgttgccctggcggaccaagacgtccttgtgtaagtaagtatggcggctccccttccgcaccgccatatccactatggaagcgcgccgcggcacacgacacaagccccgggacatatgaagaagttatggccggttcaaagcacccgtattacagcccaaacggcaccgcgcgcagcgggattgcacgacggccggacgccactcataatcggaaaccgctcacagccaaatgccacccgaggccggacgccatataaggaaccgtggcacggcagatatagaaaatgcccgccatcatagactgacgagcgtgatatcgggtgggcgatgtaggaatcgaacctacgaccccttcggtgtgaacgaagtgcgctagccgctgcgccaatcgcccgagcttgtgatgaaaaaaccggcaacattctgccggcgattcatcgagtgggcgatacaagattcgaacttgtgaccccttccgtgtcagggaagtgcgctaccactgcgccaaccgcccgggtcatcatccggtcgaatcaatcagcatgaatcaaccatccgagagcggacaacgggactcgaacccgcggtctcaaccttggcaaggttgcgctttaccaactaagctatgtccgcatgtgttaccttcacaggcaacaggtgacaaagatacgccaatctcaggaaaaagccaagcccccgcgtgtcccaccggttttccaacgattatcgagcgccgaagtgaagttcccgaactacgccgacgtgccgtccttcatggaatcaggcacggtatgggcttcatccctcaacgcgcgataatggcggtatgacgcaacgacaactgatgcgggccacagtcgaaacgcccatcggccggatgatgatggcctcggacggcgagggcctgaccgagctctgtcttgaagactggtggtgggccaccgatcaccaagccgttctcgattcgaatcgcgaatccgatcgtgaacccgatgtgttccgtatgacccgcgtatggctgaccgcctatttcgccggcgagcgccccggcctagatcagacgccgccgttgcatcccgccggcacgccattccaacatgaagtgtggaatctggtggccgagattccctatggcatgacggtaagttacggcgaactcgccgccgaattggccgaacgacgcggtggcggccgcatggccgcgcaggcggtcggaggcgcagtgaagcgcaatccggttaccatcatcgtgccctgtcaccgcgtagtcggctcgggccgcgcgtttggcggctacggcggccgactcgacatcaaggccgagttgcttgaactcgagggcgtggatctggcgcgcttcgatctgccgaacctttgacggccccagcggtccgccccgtcaaaaggattgagtggttacccctcccgctggcgggaagtggcacgtaacgccggagggtggtcggctggctggcatcgcaacccccgctacccgacaattttcgacaagctgacgggaatcctcccacgaattgttcgccgtcggtgcagtcttgctcgatcgcgccggccaaaaccgtacaatccctacaatggaatgcatatggttaattgctgcgcgcagccgcacggccgcacgcgatcgcaagaccacgcagcccaaggggatatgcaatatcaacggaagcaggaggtgcgcatgaccggcattatcgattacgcgcacaccgaaacgcgctccttcgccgacttgccgttcaacgaaatcgacgccttgatcatctccacgctcatctatgaggatgtggccagtgtctgtccgacgttgatgctggatgagacgcggtcaggctcgttcgccgcacgcattcgcgctttcgaacccaagcatccactgatctggctgaagggtatctggcatcccgagcttgaatcggtaagccttgacgaggccaaccgcgagctgcatcgttcgccggaaacacatgccgacgacaagccgcacgaagcccaaatggtttcagtggtcaacccggacctgacccacgacctgttccaggccgcaggcgaaaacccccgctacgccaacgttcgcctgggcgcggtggtcgagcacatcaatcagggtgagcaaacccaattcgccgccgccaccttccaactgcccgacggccacaagcgccgaaagccgacctacaaaggcacgttggttatttccttccgcggcaccgatgattcgctcatcggatggaaggaagatttcaatatggctttccagtatccggtgccggcgcaacgttcagccagcgcctatctggatatggtggcgcgactgtgggagggtccgattattctggtcggccattccaagggaggcaatctggcgatttacgcggccatgaacgccgatcccaaggtgcgcaagcgcattcagcatgtctattcactggatggccccggtttcccgccggagattgtgaccagccccgcctaccgcaccatccagccgaaggtgacgaaaatcgtgccgagttcgtcgattgtgggcatgattttcgagaccccggagccttgccgcgtggtctcttccgattcggatggcatcatgcagcattccgccttcacctggctattggatggtgaccagttcatcaccgagccggatttgagttccagctcgcagttgtttaacgaggagctgaaccattggatcgccacgcttacgcccgaacagcgcgagcgtgcggtggatgcgctgttcaccgtgctgcacgccaacggcgccaccagcttcagcgaggtgatgagcaacttccccgcttcgattccggcgatgcttggcgcgtacgttgggctgacccccgcagaccggcgtcatttggttgaggccctggcgatactgttcaaggcgtccacggccaaacgcaagccgacgcccgccccggcttccgcaccaagttctgcgacctccaaagcaacagccgagatcccagcagaaactgcagcaggagcagatagcgcagctccggccagagccgatactgatgccgatgccggcaccacagcttcgccatcagcggaggacgcaactgaaatcgccgattagctcatagacatgtccacaaataatagttatactgcccaataagttattagacagcgtgaccatatcacgctggtgcatcaggaggaagagatgccacgtccacgccatgattccgaggtgctgcccgccaaagaacgcctagagaacgctttctgggaattgctcgccgaccgcgactaccgcaagatcaccgtcaccgatgtggtgcgtgaggctggcgtgaaccgtaattcgttctattatcacttctccagcctgcccgaattggccgattcagccatcctgcatcaggtcgaatcgattccgatcaaccgcacccccgacccaaatggcaatcccgaggaacaatggcgagaccgcgtcaccgccacgctctccgatccagagcaacggcaacgcctcgaccgcctggccctgttggcaggcccgcacagcacgcttgaactgaccgaatcgctgcgcgacttctgccgtctgcaaatgctcagcacattgcaacgcgaccccaagaaccttgacctgaaaaccgatctcatggtcgagttcaccgtgggcggcatgctcgccgtgctgcaacgttggcccgaattgagcgacgccatcgaaatcaaagacctgcttaaagaagatgtggccgtgctggccatgggcatatacctggccatgagccaaaaagacatgctcaattactggaatcgcatcttcgtgcacaatgcgcaggattcggccgcccccggcatgcaggccaccgccacgcatgccgctccatcccccatctcaccgtcgaacggccccgcaggattccccgggtacaccgcttgaccgaaaaccagtgagtctggattgtttccgtcgaatgaacccccgcgtgaggtttctcacaaggcgcaatcagcctctcatgctggcgtttccagccctcacacaggaagatggaagcatgagcgaaacatcgaacaaaacccgtctggaacatgactgcatcggccagatggaggtgccggcgaacgtctactggggcattcacacccagcgcgctatcggcaacttcccggtctccggcatcaccgatagccaacatcccgagctgattcgcgcctatgccacggtcaagcgcgcctgcgccatcgccaatgaggaattaggcctgatcgacccggccaaggccgaggccattcgcgccgcctgcctggaaatcgaggccggcaaactggccgatcagttcccggtcgatgtgatgcagggcggtgccggcacctcgtcgaacatgaacatgaacgaggtgatcgccaaccgtgcgctggaaatcgccggccaccagcgcggcgattacacatacatccatccgaacgacgacgtcaacgagtcgcagtccacgaacgacacctacccggccgcctgcaaactcgcgcttatcgacgcgatcgggccgctcgccgagtccaccaagaaactcgccaaggccttccacgatctggccgacaaacatatcaacgacgtgacgattggccgcacgcagctgcaggacgccgtaccaatgacctatggtcaggaatttcatgcgtttgccacgctgttgaagtctgatttggctgcattcgatcgcgtggtgccgctgctggcccagctcaacctcggtgccaccgccatcggtaccggcatttgcgcggatctgcgattccgcaagtccgccatcaagcatctggcgcaaatcaccgggctgccagtcaccgccgcgcccgatccggtggccgccatgacggatatgggcgcgtacgtggccacgtcggctgccatcaagagcctcgccgtgcacctgaagaaggccgccgacgatttgcgactgctcaattccgggccgcgctgcggtttcaacgatctcaacgtgccggctcgccaggccggatcatcgatcatgccggccaaagtgaacccggtgatccccgaatgcgtcaaccagtgctgcttcacgatcttcggcatggacgtgactgtgaactgggctgtggccgagggccagttgcagctgaacgccttcgacccggtgatggtgcatgagctgctgaccggcatggcgttgctgacgcgcgccatggagacgttccgcgtcaactgcgtggaaggcatcgaaatcaatgctgacctggggcgttcatatgcccagtcctcaccgtcgatttccgccgcgctcaaccattacatcggctacgagcacgcggccgacatcgccgccgaagccgtgcacaccggccgtaccgtgcgcgaggtggccggcgaacgcaccgacctgcccgccgagcagctggacgagattctcgatccgattcgactggcccgtggcctcggccaaacctgccgcgagcatcgggactaggcgtcacggcgacgtcatcaccacgacgatgctgcaccgcggtgccgcggtgccgcggtggtgccggtggtgccgacggcacgccaccggtatcgcaccatcggcaccaccgcaacggccaaaacccgacgtgggcccgcatgtttacgacttcaccagaaatggtcgatacagtagggcatatgaccgaatatgcacaagacatcgcacactggttccaagtcaatgcgggcaaactcatctggctggccgtcgtgctggccgtcgtgttcgcggccgatcgcgtgatcagccgcgtgctgcgcagggttctggatagttcgcagattcccagcgcctcgattttcgtgaatctcacgcgcgtgaccatctgggtcaccggtacggcgatggtgctgcagccggtgttcggcatcaatccgaccaccctggtcaccgccctcggcgtcggaggcgtggcgatctcgctgggtttgaaggatacgatcgccaacatcatcggcggcttcggcctgatgctgggccgcgtaatccaacccggcgacctggtgaccattcaaggcgtcacgggcaccgtgcatgacatcacctggcggcagaccgtggtgcgcacccgctccggggacatgatggtcattcccaattcagtactcaataccgccgccttgaccaagctcacgccggccagcgaaggcatggccacgcttgaattcacggccaaggcctccggcgacccgtccgctatcagtcaggatattctcgaccgcgtaaccaaagccaccgccgacgtggcactggagggccagccaccgctggtcaagttcaccggcttctccccttacggcatgaccggtcaggtgctggtgttcgcgcgcgagggtgtgctgccttccaccgtgagggatatggccgcgcgcgccatcgccggttcgggcaccaaataccttgttgaagatggcggctcgtcagacaatctgtgatatctcccggctcgcctctctgggtccggctatgacagtcatgcgaacagcatccaaccggtaagaatcacagtcaacagtaggtacgagataacgccgggattggcataggcggtgcgtattttaagccccgcaggcaactcctctggcgcaagatagaactcccagttcttgcgcttggtgataagcagcacgataccggcaatgcagaggcccaacatcactgtgccgtacaacatcatgatgcccatgctgcccatgttgccggtttcagccatacgcatgatttcggcctcgctgattgtgccgtcgaggatgcggggatcgatctgttgtatcaccaatggggcgagcactgccccgttcaggttgatcagcatgtgcatagccactgaataccgcagtcgggaggtgcgtgtgtatacatatccgaacatcagtcctaggccaaaggcgtagaagaactggaacacgttcatatggaatagcgcgaatgccaatgcggagaacatgattgcggtcttttctccgtaccggcgcaggcgggagataatctccttgcgaaaaatccattcttcgcaaaccggtgccaacaggcctatgaacaatgcgttcacccgccagtcgctgccaagaatcacgtcgttgatgcgattggtggcctgaccatcagtggctccggcagacaatatattgccgatcatattgcccaagagcattaccggaatgcacatgacgaaaatccgaatgaactcccccgccttcatggggtactgccgggtgcgaataaccggtacgcgagtgaaggccaacatactcagcggcatggccaccacatacagcggcccggaggaggcgagcagcacagcccaagcgggcacatcggcgccaagcagcgttcgtagtgcttcagtggccagaatattcagcccgatccagaacaccatcataatggcgagcgccgagccgattgtcgaaaaccggcgatgggccgtgaaccaccaatcgcgtggggtttgttgcggctgctgcgccgacggcattggttcgctcatacttatcccccatagtcactggccgcaaacggaccgatcacacgtgcaatactcttcaagaatacggcacggcgtttcgattgcattgggaatggggaaaatcatcaatgggcaaggaatgatctacgtcaatcaatccccatgccgagagagtcctctactctgcgggattgttgtgggacggcacgcgattttgcccgattttttcgcggcggcccacaccactccacatatgactgatgacgccgcacgaagaaatggcgtcattgcaacgattccccaatacattctgtgggacggcacgaatgtacatcgtttgacgttcatgccatcccacaccggcgtgggacggcccgcgataatcgcccaaaaatcgccgccatcccacacatatcattgccgataagccattcgacgatcgtacagtcacaaaacagaacagaaccgcacgatcatcgcaacgccattcagcaggcgagcgcggcgaccggacgcggggcgacaatcacgtcatcgcccaccgccagaccggccggcagctcgctggcgggcagctgcacggtggccttgagctgttcgcccttgttccagcgctggtattcgccggaggtgatgaccgtatccacgcgcaccaaagagccaaggaagtgaatgacctccacgcgggcgcgttcgccgacgtgcgaatcgctgctgccagccaaggccagcatcaggttctccgggcgcacgagcacggccacggaatcgcccttggcggagccggcgagcagcggcacgcgctggccgaagaccacggcctcgtcgccattggatgcgccgggcaggcggttggtgagtccaatgaacgtggccacgtactcggtggcggggcgctggtacaggtcctgcggggcggcgatctgctcgatcttgcccttgttcatcacaccgatgcggtcggccacggccagcgcctcttcctgatcgtgggtcacgaagacggtggtggtgccggtggtgagttggatgcggcgaatctggtcgcgcagctggacgcgcaccttggcgtcgagggcggagagcggctcgtcgagcagtagcacgcgcggcttgacggccagcgcgcgggccagggccacgcgctgttgctggccgccggacatctgctgcgtgtacttcttggcctgatcggcaagtcccacgagctccagctgttccatggcgatcttgcggcgttctgccttgcccatgccgcgcacttcgaggccgaattccacgttctccagggcggtcatgtgcgggaaaagcgagtaggcctggaacaccatggccatctcgcgcttgttgaccggcacgccggtgacgtcttggccgccgaccatgatgcggccgccctggatgtcttcgaggccggcgagcgagcgcagcgcggtggacttgccgcagccggagccgccgagcagcacgaccatttcgccgggcttgatgtccaggttgaagtcgtcgagcgcgtgaacggtggagccggggtagatcttgacgacgtcgcgcatctggatggagccgccgccgcgcttgacgctgtctttgagcagggccttggcggccttggtcacgtccttgccgcgcacgccttcgagggtggcggtgggatcgttcttgaaggcgtcctcggcggcagcggacgtggtggcgggtgccgaaacagaagccgcggcatcggcaccggcatggcgacgggtgaaaatcgaattgctgttcatcaggttacttaccttcccttgacttgcgcattgcgtcggagatcaggtcgagcgcaacgaggagcaccgcaccgaagagcagagccagcagcgacatggcggtggagatttgagaattggactggccgagctggtagagcgcgacctgcaggttcatacggccgagcagcgaggcgacggtgtattcgcccagcaccacggcgatggagataaaggatgccgagagaatcgactgccataggttcgggatgatcaccttgaagaacaccttgggccaggaggcaccgagcgagcgggatgcctcgaccagcgtcttgacgtcgatggagttaagccccacggcgatcgcgcggaaggcgaacggcatcacgagaatcacgtaggcaaagcacagccagattgggttggtgctcagcacgtcggcggacagccagcggtagatcgggcccaaacccaccaccagcacgatggccgggatggtcagcggcagcgtggccacccattcgatcgcgcgctccaaaaccttggagcgaatatgcacgatgaccatggtgggcaccagcagcaccagcatgatcaccacggtgaccgcgctcagggccagcgaggtgccgatgccctgccacagcacggtcaggtcggcacccagcgactcgccgttgccggtgaaaatcgcgatccacggcgcggccgaccagcggccggacagcgggtgacgcagggtgaagatgagcatggccagcagcggcacgaacaggaacgccagggtgacgaacaggatcacgaatttgatgatgctctgtttacgcgcacgagcggcgcgcagctgcggcggcttggttgcggaagtttcggtcattgccaacgtccggccctcttttccacggcgtggctcaacagcatgacgatggccacgacgatgatcattgcgaatgccagcacctgggcaaagccatgctggttggggtccagttcgttgcgcatggcaccttggatcataagcggcaccagaatcgaacgctgggagaacagggccgcggcggtcgcgtatgcggagaacgcggaggcgaacagcagcaggaacgcggagatgaagcggggtgccagaatcgggcaggccacgcgcgtccagtactggaacgtgttgccaccgagggattcgcatgcctcgcgccactgtggacggatcgaatcgaccgcgggcaggaagatgatgatcatcagcggaatctggaagtagcagtagatggtcaccaggcccggcaacgaactgagccagttcgggttcacggtgtagccggtcagtgtcttgataagcatggtgccgataccgttgatgccgatggtggcgatgaacgcgaacgcgagcatcacgccgccgaactgagcaagcacggaggagatggcggagaccatacgacgcagcaggccgttcggcttggcaccaatgaccagtgcgtaggaagcgagcgcgcccaccactgcgccgatcagagaggatgctaaagacaccagaatcgaggtgccgaatgcggcgatggtgttggcctcgaacatcttattgaagttcgcgagcgtgaagttgccgctgcgatcctggaatgcaccgacaatcacgatgacggtgggtgcgagcaggaagcaggcggtgtaggcgaagaacgggagcgtggtggcgagcgtgcccagctcctggcggtgcttggccatcgccgaggagagaggagaagcgggagtagcggacggacccgcagccttggcggcagcaggtccgttcgatgcaatgggtgcgattgcggcggtcatcggtctgtgtctcagttgccgatcgtcttgtcccagttgttctggagccactcggtgatgcgggtggagtcgtcgttggtgtaggagaccggctcgccttcgatggtgatggcgtccttcagagtggcctggtcgacggtgccgtcttccttcatggaatcgagcagcaccgggttggcgccgcccttgaaccacaggttctgggcgtcggcggtgtacaggtactcctcccacaggcgggcggcggccgggtgcggcgcgtccttgttgatggcctggttgtagtagctgacgacctgggccttcgggaaggtcttgtacttccagttcacgcccttgtccttgagctccttcttgtaggaggcctggttgtaggtccagtcgaagaccacgccggtctggccggagtcgatggtgccgttggtcacgtcgacggtggtcaggttgccggcttccttgagcttcttgaagtagtcaaggccgggctgcaggttgttgatgtcgccaccggcgagctggttggccatcaggtagccgttgaaggcggcgccagcctcggcgggcttgccgttgagggccacggtgccggcgaacttcgggtcgagcaggtcgtccagggagctgatgtcgccgtacttgtcggcgttccagcccacggacatgatgccggtgtagtcggcgtagtaggcgccgtcggcgtccttggcggtgtccgggatcttgtcccaggcctgcaccttgtacggggcgaagtagtcggtggaggtggcggcgatggcctggccgacatcgaagacgtcgggggcggcgtcggtgcccttgttggtcttggcggcgtcgagctcttccttggatgaggcgttcgggttgagctcggtgaccttgatctccgggtacttcttcttgaagctctcgatgacctcgccgtagttggaccagtcgtgcggaagggcgatgacgttcagcgcgccctcttccttggcggccttctcgaggtcttccatggtgccgaagtcggcgagggaggtggctttggcggacttttcgttcacggtgacggccttgccggtgctttcgccggtgccatcggaggaggcgttgctcgagccgcaggcggccatcgagaacgcgagcacggcggcgagggagccggccgcgatcttacgcaggttgttcataatgttccttttctcaacatcatccagacgacagtctggggagtcgggcttggtatgcgcggcattcgcgcggcccgtgaatccaagaaaagaaactatgcgcctaatctgtcctgacactggcgcgcaagtgaattgcgttcgccatttgctgtacgcctgttgaacttaggaaaacttggcatgaattactgacaggtatgggcgatgtgtcaatagcggaaccggcctgcggccgattccgcaccacacttacctcagcacgccctcaatcaatcgcgtgatgagttcggtgtagctcactccggtggcatcccaagccttgggatacatggaaatcggcgtgaagccgggcatggtgttgatttcgttgaccatcaccgtgccatcaggcgtcacgaaggtgtccacacggctcaagccggcaccatccacggccttgaacgcgcgacgggccacgtcacgcacgtcctcaagcacgctgaccggcagattggcaggcacttccacgtggctggcggaggcatccatgtacttggaatcgaaatcgtagaactggtcgtcgttctgatgatcgagcacgatttcgccgggccagctggcctcaggctcgtcaccggccttcgggcacagcacggcacattcgatttcgcggccatcaatcccctgttcgacgagcaccttccagtcgtgctcgccggcggtggcgatggcggcggccagacgatcctgctgggtctcgcggtcatcggctttctcgaccttggtcacaccgaagctggagcctgcgcgcgaaggcttgacaaacagcggataggcaagaccggcgtcctcgatcttggcaagcacatcggcggcggtgaagttgcgcgcatcgaccgtcacacccggtgcggtgggaatgccggcggcatccagcaccaccttggtgtaatgcttatccatgcaggcggcggaagcaaacactccgcaccccacgtacggcacacccatcatttccagcaggccttgaaccgtaccgtcctcgccataggggccgtgcagcaccggcagtaccgcgtccacatgtccaagcgaggtcagcacatggtgcatttccgggtcggacatgctgacgaagctggtgccgaagccggaatcggcggaattgatgtggctgggctcgccgatgaagaaaccgtcctgtccgcgagaggggtcaagcatcaccgggcgcgattccggggtgatctttacggtcggcagctcgccgccgtccaagttccagccacgcggatcctcgccattgatgatccacttgccgtccttggtgatgccgaccggaatcggctcgaaccgttcagtgtccatggcccccagcacaccggcagtggagatgcaggaaatcgaatgctcgtctgcacgcccaccatagagcaccacaacacgcttcttggccataaccatccttttgttgaaactacaaccgttttcaagcctatgctttgcaccgccaaccggaccgaaccgcgctcggaccgccgcgcacaagagacgcacaccagtctactcgtgcacaccaacgacgtatacgccacgcggcacgtacaacgtatacgccacgtatacgtcgcttctctcgttattcgccggtaacctcgtgcccgaacagtccggcaagcatctccgagcaggaaatgccttcgttcagcacgcggctcatctgatacgccaacggggtcggcacatcaagctgatcgccaagagccaccaccgcatccgtggtgggcacgccttcggccacaccgttgctgaccttggtggcctcttcgaccgtcagtcccttgccgagattcgcgccgaacgtatagttacgagacagcgaagagccacaggtggcgatgagatcgcccacaccggccaagccgaagaaggtcttgggatcggcgccagcggctacgcccagcgcggtcagttcggccagtccacgagtttcgatcatggctgcggtgttctcaccgtagccggcaccacgggccatgcccacggccagcgcggtcacgttcttcaggctgccgcacatttccaggccgatgacgtcggtggtcacgaacggcttgaaataggaggtggtgcatgcctcggccaccttcgtggcattatcgaggttcgtgcaagccaccacggtggcggcgggatgacgatcggcgatttccttggacaggttcggtccggaaatggcggcgaaccggtcggccggcaagtcaagggattcgcggacgacttcgtccatacgcttgttggtgccacgctcgatgcccttcatcaggctgacgacgatggcgcgatcgggaatcagtcccttgaattcgacgagtgccactcgcgcgaactgcgcagcgatggccacgactacgatgtccgcgttcttgacggcttcggcgcgatccccagtggcggtcatgttgtccggcaacttttcgacggacggcaggcgcacggcgttgtggtggtgatcgcgaatgccctcgacaatctgctgctccttggcccacatggtcaccgtgttgcctgcgtccgccagcacttggccgaaagcagtaccccatgctcctgcaccgagaaccgttatatttttacccatatcaaattcctaccttcgcttgtcgcgcaacttcatcggcacaatcttgtgccatgctactcgcctaggcccccgtacgggaaccggtgcggctacttctcagccgggaacgggccgccggcttcaggccaaggcttacgactcatgctgcggtagtcccagtagccttcagcggggaactgctcgccacgaatttcctccagtactgtgttcatgcgtttgagcacgcgccacatcagctcgttcacggcctcggcaggcggctcttcaccccatgagtccatgtcggcaagcagatcggagtaatcgagcgcatggtcatagcacatcaccacgtttttgcgcggccatggccaccagtggttgatggaggcggcaccccacgtcaccgccgggtacagcggcacctgatgccccagtctgcgcgaggattcaagggcgatatatcccacgccctccttaatgctcatcacccactttttcgggtcgcgggtcacggtgccttccggccagaccgtcagcgggcggccggacgtcagaatatcaatcgaggtctcttcgatctgcttggccttgcccgaatgacgctgcaccggctgcatgccgaccaactggaaccacttgccgatcaatggccacttcgccatctcggccttggccatgtaacgggggcggcggcccatgtggaacaggctcatcattggcacgaacacatcaaacatggtgacatgactggcggcggtgatgaacggtccggtttccggcacctgttccaagccccaggccttggtcttgcagctggcgcggaacacaatggacacccctcccagcagtcgtttggtggccttgggattctgggcgttgatttccggctgattgggcgtgcgggggccggtcgggtaatactgtgtcgagtccacaagcgtgtggcgggcggccagacgcttgacctgctcatcactcagcgggcttacggccgaacgcggcgacggttttcctttggatgccatggtctctattgtggcacggaccaccgcccaacgattccagcgcaacattcccgggaatgcgtcgcacaatacgcggcggcccgtctgcacacaccatgcgcgcagacgggccgccgggaaaacgttcgaatcactccaccgcgatggcgtcaatctccacgagcgcgcccttgggaatcatgttgttgccaaaggccacgcgggcgggcttgacggagccgatgaacacctcagcgtaacgtgcgtccacttccttgaagtcctcgacgttcttcaggtagatggtggcgcggcacacatgctcaatgccggtaccggcagtgtcgagaatgtgcttaatattcttcagcgcctgtgcagcctgctctccagcggtctcgcccgccagttcgccggtggccggatcaatgcccagctggccggatacgaacacgaagccattggccttcaccgcctggctgtatgcgcccagcgcggccggcgcctcggaagtggctacggcttccatcttttcgctcatattgtgctccttctcatcttgggggcgcccacctgctgcggccggcgccggtacacatcaccaccggctacgaccaatcgcacgatcagcaacgattggcaatgccgattacgtagcagtctactgagcaaagtcgcgtttagcgcgcatgatgcccggcatacggccatcaacagactattccttgctattccagacgattccagacgattccagacgattcggctaccgttctcgccaaaccggacggtttttccacgacccaagcgagccggcatcaccggccttgccattgccgacaccagcaccagccttgcacgcgccgaatatgcaaaaggcttccggcggttagccgaaagccatgctggtgggcttgatggggatcgaacccacgaccttctgttccggagacagacgctctatccactgagctacaaacccgagcaacttctttactgtacaccacatcacgttgcatgcggcacatacgtcgccaaaataacgagaaaatcgccattatcggctctacaatggggttatgtcggaacctacagatgacttcgaatacgaacgccgcttcttctgccgcgaactgccggcggaatacgacgacggcgacgccccgaccctcatcattcagagctactacgtgcatgccgacaattacgccttgcgcgtgcggctggtctcgcgcaaggttcacgtcgacatgacgcccgacgtaaatccggtggccgtgctggacgaataccgcgaccggttctcggaagcatatgtcaccgtcaaaggtccgtccgtgggcggcacgcgctacgaagtcgaacgcgaaatcgatacgcgtatcgcggccgaactcatcaagcgcggcggctcggtaatcatcaagaaccggtattccgtgtggattgaggaagacggctggagcgtggatgtgttcggcgggccgaatgcgccgctcatcgtagccgaggccgaacgatccgggccggttaccaatctgacgattccgaaattctgcatcaccgaaatcaccgatcaggcgcgattcaataacgatggtctcgccaaccgtccgttctgtaagtgggcggatgatttcgaggaggagctggcgctggaggggccaaggttccagcagtatttcgggaagaatcggatggtttagggggggggagcaatcgagtacgctcgtgagctcccctcagtcatctacgacgacagcccctctcaaagaggggagccaaaaccacttagtacatgagagtggctaggcgacgacgggcgcgggtcagacgcgggtcggtgggttcggggatggcgaagtattcgagcagacgcttgcgaacctgctcgatatcggccttgtgcccggcggccaaaaagtccagcaaacggtcgaaagcgtcttgaatctggccaccaatcatgtcgatatcagccacggccaactgcgcttccacatcgtccggcgctgcggcggcagcggcacgtacgtcacgtacatcagcggccccggagcgggccagcaacagcgccttcgcacgttcgcgggcggccagtgcatcggacgggtcggatccgagcacgcgctcgtattcggcggcggcaccggcgtaatcgccctcctcggccaaacgatgggcttcggcatgctccggcggcacctgctcagcacccgcgacggcaccggtggcaccagcgctcttggcggcatcggaatcaggatcacccgagtacggcgcggtaccgttcacaccagactgcgcggcggcctcaataatcttcggaatcacctcgtcagtaagttgcttgagctcgtcgtcacccggaaggccctgcaacagcggcatcggacggccggcaatcaacgcgaacagtgcgggcacgccctgcacctgcagcgcttgggcaatcgagggattggacgagatatcgatacgggagagctgaatctggccgttcagggcgttcaccgcgtcgcccagtgcacgggccatcgggaacaggcggtcatcggtcggcacccacagaagcagcaggatcgggaaggtcgcagaagtctgcaccattgcctggaaggtgttttcggtggtgtcgatcacgtacccaccagcggcaggcgcgccgcccgcttgtccgggctcggccttgacctgatgcttcagcgcctccaaatcgacggcgcccgccaatgagactcccggattgaactgctgctctgccataatgcctcccgattccacgcgattcgcgtacaacaacaatcacatttgctgacattgattgtaatgccgattcccaccacgtagggattcttccactacgcggtggaattcccaccacgtagcaaaacgcccaccacgatgtgaccccaaacggcaccattatgcgaaaggtaaagttttatcgacatcgtggtggacgaatcacatcgtggtgggggcgttaaccgcgcggtgggtggcggcaacaattacagcgcttcgacctttaccggctgacggtcggcgcccactgcggtgatttgctcaccggaacttgccaacggaatgtacaaggccaccacgttcacatacgtgaccttcatggtgctggtgtacttgtcgctattgaacagcgccttctcgtcgtcggaagccggccgcgattcgcggccatcccctgccttgcgagtccattcgccgttaatacggccaaccaccagatcaccggcaccgtctgcagcacgcatcacccacatctgttcaggcacagcggtgaatttttgctcctgcgtaccgttgttgcgttgcataccttcctgcaccttggccgtggtattggccagttcctggcgcagcaaatcgtctgcgaacttggaagcgtattggctcttggagccgttctgcagcacatcggcgtattgggccaaggcatcggcgggagcggccaccagcttctcatcctttgcggtgcccatctgcgagccaatagtcggaatctcgaacttcggcagcttggcgccctcaaacagtcgagccatagccatcagcttgtaattctgctgggcggattcctgatcgaagaccagcaaacgcttggactgctgatcttcggtggtggtcgtgatggtgaacaccgagcgaggccatccgtcgtccgtaggaatcaccgtctgggcgatgtccttgggaatggtcgcatattcggacataccgccgccacgctgattgatcgtggtctggctgatgcgaatgtccagctggggcccgcccataacggtcgcatacccatcgggattcttggcctgatcggcttcatcgatcgtcttgagaatcttcagacgaatcttcttctcctgcgcctcggtcaaatccggcgcaaccttggtggaggtatcagcagccggcgtcggcagttggccttcacaggcggtcaacggcacgaccaacgccatgcaggcgagggcggacacacacagtttgttccatcgcttgttcatcagctttcctcctgtccgtcatcggccgagtcgtctccggtattgacctcttgggccaagcgggagaagtaggcctgcagttcgtcaggggtgattaccgaagtcgattcgttatcgccggcgctgaggccgggctcagcgccgctttcggcaccggtctgctggtcggcgaccaggttacgcgaacttgggtcgatgataaccggtgtttcggtggcttcagattgcgaggattgcgaggacgcacggcccgaacgccgatgtgtggcgtgacggcgacgattacgtcgacttgcaccatccggcttcccggacactgcgatgctggcgggtgcctcttcctcgattacggcgcttgccatgccttccaccatgcgcttgcggcgcttatgcggcggcatggcgaacacggaggcgcacagtacggccagcacggccagcaatccgccggacagatagaacggcatcgcaaagtccggcacttcggagcgcacccagtgcagctgcaccttggcgttggtgacattttcgcccaaatccacaatggctaccgtcgaggcgccggtcttcttgctcttcagcgaaacggacccagtgccgcatttcacggcagtccacatatcggaatccttgaacgacaccgcgtcatcggcactggcaggcgctccctgactcgtgctgcttcccttctgggtgctcagctcgctccatgatgccaatccggtgatgcgggtataggacttctcggacgcgacccatccggcaacatccttggacgaacccaacgccacgcacgcctcgtcctgagaggatcccgagtccacggttatcgtggcattctgatccaacaaggtcagcacattcggatcagtgacgacataccgggagccgctcatggttgcggaagcggtgatttcagtggagggcttccacatcgtggcattcatgtaccccaacaccacagccgccacggccaatagtccgaagataggcgtcaccactccacgcatgatcttggcatgacgggatggacgcttggcgcccttatccggtcttgtagtctgttcttcagcactcataactcaaccattctacaatcttcacctgtttattacctaggagcgcagaaaatcaaggtttaccagtagggtgatgtgtcatgcgtaagtctgttaagtctatgttatctcccctcggcaaggccgttgcccttgcctgctcgctggcgatgtgcgtgtcgctggctgcctgctccagttcgagctcggactcgaaatcctcttcttccgattcctcttcatcttccgactcttctgacaagaagggccaaattgccggcgtgaccgccaagggcaagctcggcgagaagccgaccatctcctttaatacgccgatgaccgtgtccgacggctcttatgtggtgctgcagaagggcgatggcgacgtgatcgaggagggcgaccgcgtctgcgcccaaggcatcgcgctcaacgttaaagacggaaccgagctcatggacacctggaccaagaacacgccggattgctcgctgaaggtggattccaagaccctctcctcgacctactacaaccagatcaagggtgccaagatcaacaccacgatcggctttggcgtcaacgctcaggattcgtccgggtactcttacattctggcgatgacgtttgtgtccaagtccaaggacttggagaaggccactggcgaggaagtcaaggatgtgccggccaatctgccgaaggtgacgcgagccaaaaacggcgagccgtccatcgacatgaacggtcagggttcggttgattcgctgatctcgcagacgctgatcaagggtaacggcgccaagctgaccgacaagaacaccgtggtggtcaagtacaccggttggcttacgaatggcaagcagttcgattcgtcctgggatcgcgattccacaatcgacgccgatctgttcagcgattccagcggccagcatcaggttatcgagggctggcagaagggtctggtcggccagaccgtcggctctcaggttctgctggtgattccgccggatcaggcctatggagataaggagcaaggtccgattcccgccaactccacgttggtcttcgtaatcgatattctcgccgcgtactaaaagatatagcaggggctccctctgatgagggagcccctgctatatctagaacagcctgagactgtcgtcctcggtgcctttcatatcgtcgtaatcgaggatgaggcaggtgaagccgcggtctttggccaagacctgggcttgcggcgtgatggtttgtgcggcgaagatgccgtgcaccggggccagcagcggatctcgattgagcagttcgcagtagcgagtcagctgctcgacgccatcaatgccgccgtgacgtttgatttccacagccacatgctcgccctcggcattcacggccataatatccactgggccaatggcggtcgggtattcgcgacgcaccagcttggctcccttgccgatacgctcgatttgctcggccagatagcgctgcagatggtcttccacgccatccttgatgagacccggatcttcgcccagatcataggtttggtcggaatagatatgctgcagcgtcacttcaagaatgtccgaacccttgtcggcgctgacacgtagcaccttttccggctcaccagcggcgacactttccggggaatgcgtcgcagaatcaccatccacagccccaccagcgacactttcccgggaatgttgcgcggatttggcggctgggtcgatctcacgaatcgtgcagggcgcggtcatccagttcagcggcttgtaggagcccaattcggagaaaatcaacaggctggaatcggccttgatcagcaatacgcgcttggccaggggcagtgaggcgttgaggcggcccgaatactcggccgaacagtcggcaacaataactcgcataggccaccactgtagcgcaacacatggcatacatagcaaaaggggctctctggaaaaccagagagccccttaaggagttggttcaggtcactcggcggtgccggagtactggacgtcgtggccgcgctcgaccgccacggtgagtttgttcgagtcgaaggaaatgaatccgtcggtcacctcgaacatgtggcgatcgccatcgggctcaaccacggtgagcgtaccctgcttgatcaccgtgagcacaggctcatggtcgggcaggatgcccatgccgccctcagaggcgggaatggtcacgctcgtcgcctcgccgtgccacacagggtggtcagcggcgacgatgttgaccttcatcgtggttttttccgcagccatcacgcacccagttccttctgcatgttgtgccacttctcttcgaggtcgtcgatgccgccgatgccggagaacgcctgctccgggacgtcgtcgtacacgccgtcgcagatgcgggtgaaggcttcgatggtctcgtcggccggcacgtaggagccggggcgaccggtgaacttctcagccacatagaagttctggccgaggaactgctcgatcttacgagcacggttcacggtggtcttgtcctcttcgccgagctcgtcgataccgatcagggcgatgatgtcctgcagctccttgttacgctgcagaatcgccttgacgcggttggcgcagtcgtagtgagcctggcccacgtaacgcggatcgaggattcgcgaggtggagctcagcgggtccacagccggatagatacccttggaggcaatgtcacgagaaagctcggtggttgcatccaagtgggcgaaggtcgtggccggggccgggtcggtgtaatcatcggccggcacgtaaatggcctgcaacgaggtgatcgagtgaccacgggtcgaggtgatgcgctcctggagggaacccatctcatcggccaggttcggctggtaccccacggcggaaggcatacgacccagcagggtggacacctcggaaccggcctgggtgaagcggaagatgttgtcgatgaacagcagcacgtcctggttctgcacgtcacggaagtactctgccatggtcagtgcggtcagcgggacacgcagacgggtacccggctgctcatccatctggccgaagaccagtgcggtcttctcaagcacgccggcctcggccatttcgccgatcagatcgttaccctcacgggtacgctcgccgacgccagcgaacacggacacaccaccgtggttctgggccacgcgctgaatcatttcctgaatcagcacggtcttgcccacacctgcaccaccgaacagaccgatcttgccgccctgcacgtacggggtcagcagatcgatgaccttgatgcccgtttcgaacatctgggtcttggactccagctgatcgaaggccggcgggttgcggtggataggccaacgctcggagacggtgatggtctcatccggcttcttgttgaggatgttaccggacacgtcgaagacgtggcccttggtcacgtcgccgaccggcacggagatcggggcgccggtgtcggagacggaggcaccacgaaccaggccgtcggtgggcttcagagcgacgcaacggaccgtggaatcaccgaggtgctgttcgacctcgagggtgatctcggtctccttcgcctcgccttcttccttggcgctggtgttgacgatcgttactttcagggcgttgtagatgtcgggcagatgacccaccgggaattcaacgtcgataaccgagccctggacgcgggtgacgcgaccgttggtaggctcggccgcagtggtctggttgtcagccatatgcgttcctactcttccttcttggtcagcgcgtcagcgctgccgatgatttcggtaagttcctgggtgatcgaggcctggcgggaagcgttgagcttgcgcgtaaggtcgtcgatcaggtttcgtgcgttgtcggttgccgtgtgcatggcgttctggcggcttgcggtttccgacgcggccgcggtcagcaggcactcgtggatacgggactgaatgtacttcggcagaatcgcatccagtaccttttcgaggctgggctcgaaagtgtacagcggagcgacatccgcagtagccggtgcctcttcatcaggatcgggcaccttggtctcgtttttcacgatttcgaccggcagcatgcgcagcacgcgcaccttctgcaccaccatgttgatgaactcggtgtagacgatgtagagttcggaaactccacccttctcagccggcttcatgtaggcgtccatcaaggtgttggagatcgtttcagcaatttccacgccgggctggtcggtgtcgccttcccacgtcgccgcgatgtcacgattacggtacttgtagtacgtcgaaccgcgacgcccgtacacgaacagctccggctgcttgcctgccgcatcgaggcgggacagcagcgactccgtttcacggataatcgaagaggtgtacgggccggccataccacgatccgaggtgagggcgagaacagccacgcgcgggttcttctcgtccttcaccgcgatcggatgcgtgatatgggtgtgggccaccaacgcttgcacggcatcgaaaatcgcatcggtgtacggcttcgcgttcagggccacatcacgggccttggcgatatgcgaagacgcgatcatctcctgagcgttgaagatcttcgccaacgactcggtggagcggatgcgtgatttcaatgcgagttgcgagcccatggcttacttttctcccgccacgatcttttcctgatcgaccggcgcggccttgtcaacgtccggcttcttctcgaccagcggcttgccggcggaagagacgaacgtcgaacggaactcgtccacggccttatcgagggcagcctcggtgtcggcggtgaattcctcggtctcgcgaatggtcttgaggatatcggtgttgtggtcgatgtagtccagcagtccctgctcgaacggaaggacgtccttcaggtcgaggtcgtcgagcttgccgtgggtgccggtccatacggacacgacttcctgttccggcgagtacgggtggaactgcggctgcttcaacagctcggtcaggtgggcaccacgggtcaactgggccttggaagccgcatccagatcggaggcgaacatggcgaaggattccagcgaacggtactgtgccagggagatcttcagcgtaccggagaccttcttcagagccttggtctgtgcggcgccaccgactcgagagacggagataccgacgtccacggcggggcgctggttggcgttgaacagatcggactgcaggaagatctggccgtcagtgatggagatcacgttggtcgggatgtaggcggacacatcgttcgccttggtctcgacgatcggcagacccgtcatcgaaccgccgcccaggtcatcggagaccttggcgcaacgttcgagcaggcgggagtgcaggtagaacacatcacccgggtaggcttcacgccccggcgggcggcgcagcagcagggaaatcgaacgataggcctctgcctgcttggacaagtcatcgaagacgatgagcacatgcttgccgttgtacatccagtgctggccgatggccgagccggtgtacggggcgatgtacttgaagccagcggaatcggctgccggggaggccacgatggtggtgtactccatggcgccggcgtcttccaggctctgcttcaccgaggcgatggtggagcccttctggccgatggccacgtagatgcagcggacctgcttcttcgggtcgccggattcccagttggccttctggttgatgatggtatcgatcgcgatggcggtcttaccggtctggcggtcgccgatgatgagctggcgctggccgcggccgatcggggtcatcgcgtcgatggccttgaggccggtggacagcggctcgtcgaccgggtggcggtgcatcacgtcgggggcctgggcttcgaggatacgacgaccctcaatgccctggatctcgccgaggccgtcgagcggcttgcccagcgggtccacgacgcggccgagatagccgtcgccgacgggcacggaaagcacttcgccggtgcgtcgcacttcctggccttcctcaattccagcgaaatcgccgaggatcaccacgccgatctcacgggcgtcaaggttgaacgccaggccgagcgtgccgtcttcgaacgtcagcagctcattggccatgcaaccaggcaatcccgtcacgtgtgcaatgccgtcaccggccgtggcgacatagcccacttcctgggtgggggtgtcgctcggcttgtacgacgacacgaagtcgtcgagggccttgcgaatcgaggcgggatcgatggtcagttctgccatgatcactccttctattggttattgttcagtcaagtctttgcttgtgtgtggtgttggacggattggctcggccggtcaggccggagtcgcctccgtctgcaccttgcgatgcaagttctgcagctgtgcgaccacggtgttgtccgtgacttcgtcgcccacctggatgcgcatgccacccagcacggtcgggtcgaccaccgagttgatgtgcacctgacggcccaccttggcggagtagacctcgaccagtcgcttgatctgctccttcttcagcggggtggcggtggtcacggtgaccatcgactcgcccatgtggcgggagaacttgttgatcagccactggatggtctccaagtagcggcggcggcgcaggttgcaagtggcgtgttcggcgagcctcatggtgaccttgttcagggtcttgccagagaacacctcgcggaacagcttcacacgggcctcgctggtggcctggtagtcgtacagcttggcgcgtacgaccggcaggttcagcagtgcggaatgcagctcggacagctcgatggatacctgcagcgtggcgtcagtggcgtccgcgtagtacatcatggcgtccacgccgaagtcttccactgcgttggcgatgtcgcgcgcacggctccaacggcgggagaccaagtcagtcatgatctccatggtcatcggatgcgcgttgtcaccgagcagttccttcaggacggccaccttgtcggcaaccgggcgggacgggtcggtcagtgcgcgctccagctgaatgctgtcatcgagcaccttggtgatcgtgaacagttcgttgccgatccgccacgcgtcctcacgggtgtcgcgcagtttcggggccagcgaatcacgcgactcgcggtctgcaatacgtgatgcctctcctcgcatggtcacctccctttctggttacggatggtcacggtcacttcttggcgcccaggtcgtcgatcatcgaatcgatcatcgaggactgcacgtcgttgtcttccagcttggcaccgaggatcttgccggccagggcggtggcaagtgcgccgacctcgcccttgagcgagacgatggcctgctggtgctgggattcgatcgagcgctgtgcggatgcggtgatctgggccgcatcggactcggcgcgggaacgagcgtcggcgatgatgtgggacgcttccgcacgggcgtcgtcgcgaatcttggcggcgtccacacgggcggtgctcagctgggcctcatacttggccttggcctcgtcggcatccttcctagcctgctccgccttggcgatgttgccctgaatcttggcggcgcgctcgtcgaagatcgcattgaacttcggcatgaagaacttgtagaagaacaccgcaacgatgacaagaatgatcagcgaccatacgatgtcataaacctcaggaatgaacaggtcaatcccgcttgctgcttgtgtcatcaagccctcctttcagtgatggacataatcggttttcgtctgttgatctgcgcagatcagatgatcagggcggcgacgaagccgatcagtgccagcacctcgaccagagccaggccgatgaacatgatggtctggatcttgccggacatctcaggctgacgagcggtggattccatggccttgccgaagaggatgcccagaccaatgccagggccaagagtaccgataccgtaaccgatgacggacaggttgccggcgacctctgcgagggtgatgatatccattgtgtttcctttctaacgtacttggcgacgttataaatcttggggtttggtcggtctgcgattttcccagaccggggaccggaagcggcgggttagtcgcccgtcactcttccgggaagctcaggttgatgtacacggtggaaagaatcgcgaagacgtaggcttgcaggaaggcgacgaacgcctcgaagcaggtcatggcgaaaccaccggcgaaccacagcgcacccaccgggatgccctgcagcttgttgaccgcgtcaaccatccagaactgtgcgaacgccaggcaggtggcgaccataaggtggccggaaaccatgttggcgaacagacggatggtcagggaggccgggcggatgatcaacagctcaagcaggttgatcggagccagcaggaaatagaccggccacggcacaccgggggtgaacagctcgtggcgcagatagtggccgaggccctgcgagcggatggcggcgatccagtactggatcagtgtccagacagcgaacacgagcggcatgaccaccgtggcgttggccgccatgttcatacctggaatgatgccgcacaggttgaaaatgaagatcgtgaagaacagggtggtgatcatcggcacgtagcgcttgccacgggcctcacccatcacgtcatacacgaccttgtcgcgcacgaagtcgagaccgtactcgactacgccctgccaacggccggggatgagcttggcgcgctttgcggtcacgccgagcaccaccaacagcacgatggttgccacgatacgaatcaaaataatgcggttgatggcaaacggagttccctggaacagaatctccgggggaaggaagtcatcaaccgagggcagatgagcgcctgcctcgtcagccaacagcaatcctgcgctgagcgaaccgaccatatcacgcctcctgcttcttcaatgtcaggtgtcagtttaaacccaccgggcaggcaaatgtgacgtgctcgttactttcgtctttttttgtctcctcggtgtggagtctgccgggcatggacacggagtctgcgctgggcattcggctccgaatgactgaagagtgattatttgcctgcgtctagacaatgtcaatattataccggcgagtctcctgaaatccctactgctgcaaggttttcccgggcgtttcgcgaacgttgtgcactattggtcgcattacgcggatgtgtggcattacgttcatcaagccgtccacatcgtggacgaacaaccgtccacgctacgaacgcaacctccaacagtagctccctctgatgggccgagccgtgaaggagaagcaaaggagctccccgtcgaggggagctgtcgtcgtaggcgactgaggggagatcgtaggctcagccctgaatcaccccatacccgtcatgcacaaacggcttgaaatcatcctggcgcggcccgcccggctcatgccgaatcgaacgatcagtaccgagcttcttctcagccctgagctgcggcacctcggtcaggtcatacggcgtggtctggtacacccagttgagccagttgcgccacagcagattggcgtgggcgcgccaggcgaacaacggttccagcttcggatcgtcatgcgggaagtagttcttcgggaagggcacgttggtcatgcccttggccatatcgcgctcgtattcttcggcgagcgtgtacttgccgtactcccaatggccgagcgcgaacacttcggagaagtcacgcgtggcgatcaggcccgggccggactgcggcccccaagtcaagatctgaaggtcatggttggcacgtacctcgttttcgttcacgccggcgaggcgggagtgcggctgcagatcaatctcgtcgaagccattggtcaggaagcagtattcatcctgcaggtactgcgggaatacgccgaaaatcttctcggggtaatccaccttgtggatgccgtagcggtagtacagtgcgcccatcgcaccccagcacaggtacatggtggagaacacatgggtggaggcccagtcgagaatcgtcttgaactcgtcccagtagtccacatcttcgaacggcatatgctctacaggcgcgccggtgaccacaaaaccgtcgtaatagttgtctttgaacgcatcgaggttttcgtagaacttgacgagatgatcggcggaaacgtgcgtggcctcatgcgtggaggtcttcatgaagtcgatttcgacctgcagcggcgacttggaaatcagacgcagcagctgtgtttcagtctcgattttcttaggcatcaagttcaggatcaccagtttgagcgggcggacgcgctgacgctccgcctcgggcttctccagagcgaagatgcgctccgaatcgaggatatctctggccggcaggccactggggatcttgataggcatgttcctattatgtcaatattcgggataacggttcagggcattcctataacggccatttatggcgcgttattaccccgactccgactccgccccaaacccctcgctgcgtgagccaattcacgttttaaaaccgcgggaagatgacgcgacacgccgatgttgactttctggaatctgcacctattgtagatagagctgtctgagagacaagccgacgcggggtggagcagctcggtagctcgctgggctcataacccagaggtccatggttcaaatccatgccccgctaccaacgcctcaggtttcacattgaagaaacctgaggctttttctatatctacgaggttccacaaggtcttaccgacgaacttctgagacaagctggcgggcgttattcccatagcagccgctaagtccttttgcgcgcagccgcgcagcgcgatagccacgcgcatgttccgcgtcactatctcttggagactttcactttgcctcgattccgctgtaggtcgagggctaataattgtttgtgtcatgcaattagattagcgtcagcctaattcaattgtccactgcgacacgccggattgctcagcttaacttctcatgctataaatcaaggcatgtcgaaatctaataaagctgagcttaattccgccacgctgagcataaagacgttgcttacatggcgcggaattttgcagaaggacgcggctaaagccttgggtatcacgccgccgtccttctcgaaaaagctcaatggtgatacccgctttacagcggacgaagtagttgcgctatccaaaatgctgaacgtcagcactgatgttcttcttggccgcaagccgttagaggtgaagtgacatgcctgttttcaccaaggagtcgcacaaccatttcgacgttgaccatttcgaggttgacaactcgtttggcttcagaatcaccgttgacggcgattacttcgctttcgcgggcatgagtctgggcgacctcgtgaccatcaaccagcacattgccgaggcaatcaggaaggggcgtagaagtgcgctatgaggtctcacaggaacccaaggacgtggagccgggcgatatcgcggttatgcgtctcgtgaccacgaagggtgccgtgaaatggacgtgcggcaccgtgcgctgcttcacggacgatgacgaagacccggcaatcgttctgaccacgggcaagattcccgaatatgacggttacgaactggtgtgccgtatcaggccgataccggacgtggtgcaaatgactctcaatgatgacggcgaggtgatggcatgaccacaagggaaaagattctgttggttccgttgtgcgcggtgctgcttgtggtggcgctttcgtggcggttgtggcttatcgctcttggcttcgcggtggcggctgccgccgtcgtatggctcgaaaccgaggaaggggccgattgtgagagggattagaaccgttcttgcggcaccgttcgcggtgctggcgttcgcgcttgtgaccgttgccatgttcagtgcccgagccgccatgtggattagcgccggttacaggggcgcggtgaaagtagaggccgaactatgagcatgttccagacacctacgcgcgtgtgggcgaacgctcaccccgagtatccgggattgtttgagattcattctgacagcggagatattgcgttgaatcaggtggcgacccgacagactcttgaggcgctacgcgcgtccatcaacgacgctttggctcaggacgatttgcgccgccgaagacgacggtaggcgtgccgataactgaatgtgccgtaatcgggggcgactctaggtgacccgtagcacggtgaaagtaccctagcgcggcttgctcaccgcgttacaaacacacgccctgtgggggcgtggttaagacggcgcggggacgccatgcgggttactgaacgacttggggcgcattgtcagggcgcaacagggtgcagcaccgtcatacgtggcgggcctcttgtcgtgaccttgcgcgcggcttcggccgctgacctcaaagcgatatacgcggctccgttacgaagcaatttgggcgaacctcactggaaacgacggcgaagccttgcgcttcaacgcttgtttccggcttaggttcccccgctcaaccgctcaccacccgaaggtcacatgaaatgaaaacccggttaatcacgattcacaagaacatcaaccaagcacttacgacgaaacgaggcaacaagatgggttatgcagtctcttacaaacgttccggccgtccgatttcccggcgtgccaagcgtcagtcaccggcgaataaggcccagcggacgaaggacatgaagaacgctatcaggtggaacgtcgcccagttggagcatgacaccacgggcaccgactcgattgagcgtggcatggtgtgcaagctgctgcatctcggcaagattgcgccgaccgctgacccgaccggagaccatgtgttgcagcagcttatcagtgaaggctacgtgcagcggcctcgcaagcgcgccggtgttcaggtgttcgaccgcgccgacctgttgacctcgctcaaggcttacgcgggggtgtgctgaatgaacccgcgcgcgaaactcacgaccgctcaggccgcacggtacttgcatcgttcacaaaggcagatggagcgcatgagggcggacaacaccggccccgtctggttcaaggccggtgacgctatcaattcgccgtgcctgtacgaggttgccgaccttgaccggtgggtgatggagcagaagggcaaggcgtgacaatggcgacaaggggattgaagcgccagcgtggaacgataccgcgccgcgtgcgcgaagaggtcatagagacatggggcaatgactgttggctggaattgccggtatgcacgcaccacggcgaggaagacgaccatatcataccgttcaaggccggtggccgtggcacggtggcgaacatacggcgcgcgtgcaaggcgtgcaacatcagccgaagcaaccgtgtgctatccggttacggcgcgactatccacgcggttatcggcccgccgtgcgccggtaagagttcctatgtggcgcaacacgcggcgagtgacgcgctggtgctggacttcgaccagttggcttcggcgcttacccttggcggtgacgtgaaggccaagcccacggccccgttgattcaggcgggccaaggcgcatggcaaggcgcgtacaacaagctggtgcgcatgaacgcgcctgttgacgtgtggcttatcaaatcgataccggccagccacgctcaccctcgattgcttgaggaatggttggcgctcgactatgacattcacgttgttgaccccggcgctgccgtggtgttcgaccggttggagacgcagcagcgcaacgagggcgctaggcagacggcgcggcaatggtattcgctgcatctctcgcagcagctcgtggacgtgagacaggccgcgcggcgtgcgaagctcgttgcccttggccttcgttcgggttcaacgtctgttgcttcacggcccgagtggtgaggctcgttttttaaacggacggccttggaaatcaccccgcgccaagtttttttcacccccaaccaaaaataaaaaaagcctgaaaacggcggaattgcaacgaaaagaggcgaacaatggcaattcagggaacctttgagggattctcggaaatcggcaatcgtcagggcttcatggagacgcgcacacgcgccaacctcaagacgttcttcgatggaaagaccgtcaccgaggccgctgacacctacgcggcgctgatgaccgcgatagcgcacaacatcgatagctatctggcgttgggcaagaacatttcgacgcttgcggacagctataacaacgctttcgaccatttgcgcgaactgtaccccgaggcccccgagcttgacgagaatctggccgcgctgctgaccgaggcgaaggcgtgaccgtgtcaatgcgcggcggcaccgcgcggaacttggaacgccggactgacggcgctatagtggcccgctttgccgaactgctgggtacgcccctattgccgtggcaacggctcgtggcggacgtggccggcgaaatcgaccccgacaccggaacatacttctacgacacggtgattctcagcacgccgcgccagtgcggcaagtcaacgctggtggacgcttgggacacgcggaacacgcagtgggggccgaaccggtatgtttactatctcgcccagaccggcaaggacgctggcgaccacttcaagaaattcctgaagactttgcaagcctcaccgctcgcccccatcacaggtaggccgtacatgggacgcggcagcgaggcccagccgttccgtaacggttccatcatcatgcctaaatcggtgacgaaggtatcaggccacggcgtacagggcgacaaggtgacgctggacgaggcgtttagcctaagcgaggaaaccggcaacatgattcttgacggcttcgtgccgaccatggcgacacgattgcaagccaccggcgtgcagccacagctgtggataacctcgaccgagggcacggcggacagcacgtttttcaaccggaaacttgacgaatgccgagcgggcgaccagtcgcggcgtacctgttggtttgacttcgggttgccgcccgacgctgaccccgaggaccttgacatgattatgcgctaccaccccgccgccggtctgctctggcgacgtgaccaactgccggacttccgcgaacaatggcggaacaatccgagcggctgggcgcgcgcattcggcaaccagcgagacgaaggcgtgaccgacagggtgattgacgccgacctttgggccacaaccacggtgccgcctatcagcccgagcgaactgggcgcgcgaccggtggtgttcggtgtcgccgtggacgtggacgcgacccacaccagcatttcggcgggcatcgtgaacgatgacggcagcgtgaccacgcaactgctcaaaatcatggacggcaccggccacgcgcccgcggaaatcaaacggttgtgcgacacatacgccgcgccgttggtgattgacacacgcggcaccagcgccgaccttgccgaccggttgaggcacatgggcgacgaagaaaccgtgcgattctgcgatttgaccgccaccgactatctcacggtgggccagtcctatgtgagcggtttgagcaacggcaccgtgcttcacgccgccgacacggacttggacgcaagcgcggccaacagcgcgcgcacatgggccggtgacgcttggcgcgtgacccgacgcggctcgaccggtctcaccagcccgctcgaatcgtgcatgttggccgcgtggggagccgcgcacatgccagaggaagacggccccttgcaaatcttctgacaacaaccacctagttgctgttggcggtacttggcggtacttggcggtacttggcggtacttggcggcacgctgctagacccgtggcgcgccgctctcgcatactgggcggcatgaatggacgtttgagcttgtggcagcgtttgaagctggccggtggcgtgatgaagcgcggcaacgaggcgttggccgacgtgcccgctggcatcatgccgccaagccgcgcagccgcctgtgacccgttggcgctcagcaccgtgtttcgcggcattcaggttttgcagacagctataaccggcttgccgatttacgagacgcgcgccggtctcaaactggactctatcagcagtctcgtggcccagccggacgtgaaccgttcccgtcgtgactttctggcggacatggtggcaagcatggcgttggacggcaacgccttcgtgcggttggtgcgtttcggcggtgaaatcgtgtcgtgtgaggtgctgccgccgtctctggttgtcgtttccgacgatggaagcgaccccgccgccccgaaactgcgatacagttacttgggcaaggattacggccccacggatatcgtccattgcaagtttttgaacgtgccgggccgtttgcgtggccttggcccaatcagcgccgcccgcgaagaggttgagggcgcgaaaatggcccgcgactacaaggcgcgcttctacacggacagctcgaacctgaagggctacttgaagaccgagcagaaggtgacacccgagtacgcgaaacaggccaagaacgattggaaggcacagggcaccgccgccgacgtgaaggtgctgggcaacaatctcacctatgtcccgttggacatgaagcccgccgacttgcagtttttggagacgcagaagttcgacaccacgcagattgcccgcttgctcggcattccggcaagcatcatgcttgccgccgtcgacggctcgaacctcacctacagcaacatcgagcaaagctggattgagttttcggactacacgctttcggcctacgccggcgaaatcgaggagcttttcaacgtcctgttgccgcgtggccgcgaagcccgcttcgattgggacagcagccgccgcgccgacatgagcgaccgtttcaacgcctacaagaccgcccttgattccaagtggataaccgttaacgaggtgcgcgctcgtgaatcatatcccccgttggttccggcaccggaaccccagcagattggagacgaacagtgaacagaatcgatatcggcttgcgtggcgtgtgccttcgcagcagcgatgaaggcgacgggcgcacgcttgagggcatcgccgtgccgttcggccagattatcgacacatgggacggcccagagacgttcgaccctgattgcgtgttcgatgacgtggacagcgccaagctcggctatgagcatggcgagaccatcggacgaatcaccaacgccgaaccccgcgaagacggcttgcatatcacggcccgaatctcggacacgcagcggggacgggacgctgtcgcattgttgcgtgacggcgcgctggactcgttgagcgtcggttttatcccaatcgagtcggagaccgacaaacagggcatcacgcaccgcaagcgcgtgcgcctgttggaaacgtcggtggtgtcatggcccgcgtacgaggccgcgaaaatcaccgggcagcgcaacgcgcagcagaccaccaacaacaacaaatcaaccgaaagcgaggcaccgaaggtggacaaggaactacagaatatgcttgacggcatcagggacgaacagcgcagcatgaaagccgccatcgccaagggcagcacccccgaacacaagaccttgggcggtgaataccgtaccgccggagactatctacaggcgctctctcgcggagacgaagcagccgtgcagctcatgcacgaatgccgcgaccttatcgccaccggcgacaccggcaacacgagcgcttggattgcggacgatttgcggcttatcgaaatgcgccgcaaggtaacgaacattctcacgcacgacacgctgccggacaagggcatgaccatggaatacaacgtggtcagcaccgacaccaccggcgtgacgaaacaggcgaaggaaggcgacgcgctcaagttcggcaaggtcacgttcggcaccaagagcgtgtcaatcgacacctacggcggctacaccaccctgagccgtcaggtaatcgagcgttccaccaccccaatgctcaacacggcattggctgcattgcgcaacgcctacgcgaaggcgaccgaaaccgccgtgcgtgactacctgtatacgaccatcgccggtcagcgtgacgcgacgagtaaccccaacaagctcgacgcgcccgccacgcttgctaacatgaccatcgacaagtgggcaactctcatcatggacgccgccgaactggctgacgaccgtaacgtgaacctcacccgtcttggtgtcagcaaggacgttatggcctcgctcatcgacctgaaagacagcggttcccgcttcttcgacctttccggcgacggttccgacaccatcggtgacttcgacctgaccggcatcgccggtaagttccttcgtctgccggtgcagatgctccccaaggccccggctggcacggcgtgcttcatcgaccccgaatcggtgacggtgtgggaaagcggtggccccacgcagctcagcgacggcgacccgaccaagctcaccgaaaactattcggtgtacggatatatggcggttgccgccacaaacgttgacggccttatcccggtcaagttcaagaccgcctgagcgtgagtaactgattatggtagacgataccgcgaaactcgtaagcctcttgcgcgccgaagtcaacgtgccagccggtgacaatgaccggctggtggacaaggtgacggcggcaatcgagtacgttgacagcgcgataggcggcgcgaacgtttccgccgcagttcgcgccgactgcatcgtgagttgcgccgccgacctgtacaacagccgtgacgcgcgcttgggtgtcatggacgttggcgacggctcgcttgaaccctacagggtgtcaagcgacccgttgcgcagcgtgtggcccaagctcaacgcggctggcgtacccacgggcgggctggtgattgcatgagccggattatcagcgaacgtgaggcgcttatggacatgctcaccgacatgattggcgacctcgtggccgttgtaaccatcgacgctcaggaagcccgcccgctgccgggcaaagtcgcggtgcttatcgacccgccgaacatcacctacgaaggctggcagttcgtcaacaccgagtggacggtgaaccttatcgcgggcaccacggccacgcagatcgaaagcctagacctgattatccccgtcttggagcgcttgcatgagcgccacctgaacatgaaggccgctaaacccgtcacctacagtctcgcgggtgtcggcaacctagcggcctacgaaatcaccctgaacccactcgaaatcaactgaaaggaacacaatcatggcaaagacacgcacgcttggccccggcagtctgaaaatcggcgcgtcgggcagcgaacaggacttcagcgcggacgtcatcaacaccgcgttggaaccctcgaccgataccgaggacaacgacaattttctggacggccacaccgagggcggttcgcagaccgagacttgggcgctgaccggttcaatcaaagaggacttctccatgaacggcctacaggtctggtgcctgaagaacagcggtaagacgctgccgttcgagtgggtgccgaaccttgagggcagcgtgaagctcaccggcaacgtggtaatcgcgtccatccagttcggcggcgacgtgaagacgaagaacagcaatgatttttcgttcgtcgccatcgacgttaaagccgtagactacacgccttcgtcccactcctaatcatggcggacatagcctctggcggcaacagccagttgcagctcaagggcgcggcacagctcgccaagggcctgagacaggccggtgccgacctgaaggacttgcgcgacatcaacgaacaggccgcgcaaatcgtggcaccagccgccaaggcactggccccgcaacgctcgggccgtctcgcgaaatcgatacgcgcgggtgccacacagaaggccggtgtggtgcgcgccggcaacaacggcaaggtgaagtacgcgggcgtaatcaattacggctggcccaagcacaacatcaaagcaaccatgttcgccaacaaggcggctaagaacaccgaaccacagtggacgcaactctacgcggacgcggtgcagaaaatcatcaaccgaatcacgacaggagattaacgaaatgaacaacgagaccaagaccccgaacacccgtatcacctacttggacggccacgccgacgaggtttgcgtgaccatgtggcagcgctgccaagcggaaacccacgcgaaggcgaagggctggggcagcgcgttggacgcggtggtgaagctcaacgcctacgccgcctacgtgcgctgccgccaaatcggcgctacctctgttccgttcgagcagtgggccgacaccgtggtttccgtcgtggacatgaacaacgacccgaccgacaccgaggaacaggccgaaaccatgaacggccccgtgccggtctcttccggcgacatggcggacgcgccgggtttttcgaccggtgcgaccggtgggacggcggcggcttcggtgaactgagctgtgtactggcggcgcgtttcggcggcacgccgtgggcatggcggcgtgaatcacagccgcaagaggccgactggggcacctgtgtaagcctcttgcggcaagaggccgaggaaaccgaagacattcgacgcagaacgaggtgaggtgaggtgagacatgaaatcagccgtgttggccatccgaatcatcggtgacgcgacaagcgccgtggccgccatggacaaggccaaggccgcgtctatgaccttcaaggaaggattgaacaaggcttcggttgcggctggcgcttcgctcgccgccatcggcgcgggcgcgaaggtgtgcgttgacgctgccgccgaccttcagcagtcggtgggcggcgtcgaaaccgtgttcgaatccagcgccggaaagatgaagcagtggagcgacaacgcggcacaggccgtgggcctcagcaagaacgagtacaacgagttcgccacgctggttggctcccagcttcagaacttcggcatgagcgtggacgaatcggccgacaagaccaacgagcttatcacccttggcgccgacttgtcttctatgttcggcggcaccaccgccgacgctgtggacgcgctcagcgccgcgctcaagggcgaaatggacccaatcgagaaatacggcatctctcttaacgatgctacgttgaaggcccaagcggcttcgatgggcttgggtgacctgtacaagtcgggcgaccgtaacgccaagatgcaagccacgctggccgcaatcaccgcgcagagcggcaaggccacgggcaacttcgcgcgtgagtccgacaccctacagggccagcagcagcgcatggcggcggcgttcgagaacaccaaggccactcttggcgaggcattgttgccgattctcacacaggtggcggcgaaacttgccgagttcgccacttgggtgcagcagaacacctcgtggctggtgccgcttatcggtgtcatagcggcggttgcggcggttatcatcacgttgaacgcggccatgaccgcgtacagcgccgtggctaccatcgtggcaatcgcgcaaggctcggtgaatctcgcttttctgccggtcattgccgtgattctggcggttgtcgcggtaatcgcgctgctggtgatgaactgggacagcgtgaaggccgctggagcggcggcggcgcagtggatagcggacaagtggaacgccttcatggggtggcttgccggtatcggtgccagcctgaagcagtggggcatcgacacttggaacgcgataggtcaggcgttccagccggtggccgactttctgggcggctatttcaagctgctgctgagcatgttcacgttgaatttcgacggcatgaaacaggccggtcagcagatgttcaacgcactgcccggccccgcccaagacgccatcaaccgtattatcggcttcttcaccggattgaaagacaaggtgctgggcgtgttcgacagcatcgttggggcaatcaagggcgcgttcaagtgggtttcggacttgtggggcaagattaccggtgccaagagtgaggcaagcggtttgagcgcccagagctacagcacgcaagccgccgcctacgcgctgccggtacgccagtacgccatgagccgcgcaatcacgccattggagccgaccacgtacacagcgcctaccgtcaatctcgtccgcgccattgttgcccccgccaaccgtgccgacaccgcgcgccccgcgacggtgaacgtgaatatcagcgtggacgctcacggcaaccttgacaacgacaaggtggccggtgaaatcgtcagcagtctcgaccgttgggcgcgcgtgcgcggcaaggagctggcgttatgagcagcgcgaaccccttgcccgagacatgccatgtgtatcttgacctatcgcccttgcctttgcaatcggacggcagcgccgacctcgtggcgttaagccccttcactatcacttggggcgtgtcgaacccgtgggacgatatcacgccgaacgtgctgaaaatcacgcttatcgaccaagcagaccgtttcagtaagtcgggcgacttgctcatgggccacaggctcaccatctcacccgactgggggaacacagccacaccggtgaacttctgcctgttcgacggctacgttaccgacgtgcagattctcgaccatgacggcggacgaaaccggttgagcgtgacagcatcggacagaatctatatcttgaagaccgattgccgacaagggccgaacacgaacaccaccgcgaacatggcgcgcggctggcaatggtggatgcaagggcagacatcagaaacggtgcagaagtggctgtactacgacggcgtgcaaaactactggtggccgtggagtattttccccacgccattcagcgcggaacaacgcaagagcttcatcgactgggcgcaaagctgccggacacgacaggtcaacagcaaataccagttcgagattgaccgcacagcctacatctcgtatcaaagcgccgacccgaagaaaataccgtctttcgaggcgctgtatcttcgatggacgattgacaccgtgctgaccggcccgcgtatccgcacaggcgacgacaacacagacataggcgttgacagtcgttatgcggacgctggagacgtgattatcgaccccgaaccgtcgttgagcgcagcagacgaatactacacgcaacttgagttcaaatattcgcaccgaggcaacggcagcggctacaagacggtcgagttcaatcaggacggcagccgttccgttcaggtcgaacagtcggcgcgtgagggtgacacatgcctgagcatcgaggccaattggactcagtacgacaatcaggcggacagcgaccccggaaaaatcgacttcacgcttgccatgaacaccatcagggaaagcaaccggcgtttgcggctccccgaagtcacgttcaggggcgacaggctcaaccagcttttcatgtactgccgcccaacggtcatggtgttcatcggctcgaaattcgagcgttcggcaccggccgcatacgggccgtgggcgaaaatcggcggcacgctcacatacgacgtgaccaaccgcaaaagccactggacgcataaggcgcggcttttccccgccgtcaacaccaaaacgggcacgccgacatgcgcccagatgaaggccatgaccagcacggccacattcgctgactgcaattggaaacttggcgctttgcgctacgtatcgaaaataggtgaggaaccatgacagtaggaaccacggaaaaataccgtttcccgtaccccgaggacaacgagccgataaggaatctccccgatattcttcagcaacaggccgaaggcatcgaaagagtactggcgaaattcgattacggcggcggagaccagaacgcgctcaccgcgcgcgtggcatcgctcgaaaccctgttgtccaacatcaaatcgaactacgtgaccttgtacgacaacgacaacaacgtcttccaaggcgcaatctccctgaacgagtcggcggcgaacttcgagaaactcaccatctgcttcaaaagcaacgacaacgtttatgcgtccatggacgtagccaacccgaacaagaagattgtgtcgctcaccacgagcttctacaacggaaacgcttacttctacgtgaaaaaccgctgctatctgattgacggaaagacaatcaacacatggaagcgcagcacatcgaccgtttaccagaccggcgaggtcaacgcggccggaagcaacaacgcatccatgggcgacttcatcaccatcacccaagtgtacggaacaaggaaaatgagccttgtatgagcgaagcaatcatagtggcgattgtcggcgtggccggaacaatcggcggagccatgacgaccaacatgttcgccgccgcaaaaaaccggctggaagcctaccagctggctcaggaaatgcaagccgacaaccaacgcctatggcaatggaaccgcgcgttggttgaccacatctacaaagggctaggcccgccaccacccagcccgccagaagatttgttcaaacacgacaattgaaaggaaaacatggatggcatcaagtggataggaagcccgaaccactacaacggccgcttgggctacaaggtgacgcgcatcaccttgcacatcatggccggatacctgaccggcacggacagcctgtttcagaacccgaaccgacaggcatcaagcacgtacggtatcggccccaacggcgaaatacaccagtacgtagccgaatctgacgcgccatggaccgacagcaaccatgccagcaactgccagaccatcagcatcgagcatcagggcggaatggacttcataccctgtactcaggcttgccacgacgcttcggcgcgactgtgcgcggacatcgcccgccgatacggctggccgaaactcgtacacggtgtgaacgtgtttctacaccgtgagatacccggctcagaccacaccacatgccccgacctcgcgccgaacgggctgaactacatctacgtaatcaacaaggcaaacgaaatactggaaggaaacgacatgaccagcgccggagacgtttggaactacggacttggcgagaacgccacaagcggcaagaacaacctacccgcatgggtgaggctcagttgggtacatcacgacaccgccgcgctctaccgaatcctcacccgcacggacgacggcggcaccaaggacggcagcagaggcgacatctacacgcgcgtgtgctacatcgacaagcgcgtgcgtgagatgaccgcgacaatcaccgctcaggcggcggcgattgaagcgctctccaaggcgctcggcagcaaccccgccgatatcgccaaaaccgttgaaaccgccgtgaaagcgaaactggacgcgctcgaaatcaacgtgaccgcgaccagcaagaccgagaaggaaggctaaaccatggataacgaggaacaggtggaaggcggcgacccgcgcacgcccggcatcagcgcggccacaatcgcccgcttcattgtgcttctcttgggacttgtcaacgcggcgcttgtcatgttcggcgtggacaccataccgattgcggacgaaaccgtgaaccagctagtcgcgctgctcttcaacgtgggatccgcgctctgggcatggtggaaagacaacccaatcaccccgaaatcacgcgccaagcacgcgcaatgatgcaacagcccccacacaatgtgggggggctgttgcatatcaggccagacacgcggcagcggccttcgccttctcttcggtgccgttcagctcggtaccgttgatttgcgtgggccagtgcgtgaattgcttggcgaaaccgtcaaccgacatgaccggcgcggcgctggcggcatcaagaccggacaccagccatataccggtctcggtatcaccgttgaaaccatcggcggtgaacttcatggcaagccaataggtgccttcggtgtcgcccttcacggccttgccggtctcgggctttaaaccgctgctgtcgctgcctgaagccacgccattcagcacgtcttgcggcacgtccagacaatcggacttatcgacggctgtattgccgccgcaagcggccaacgacaacacggtggtaacggtgacggctgctgcgataatctttttcatggttaatccttctttgggttgtcagaatcttatcaggcttgcagagtgacggcggacatgccggcgcgtaaccggctgtcaggcatcgcaacgtagatttgtgttgtctcgaccgaggaatggcccagcagtttgctcaccaagtacaggtcatgtgttgactcataggttctggtggcgtaccggtgccgtagcgagtgggccgaccagccatcaggcagcagccgtgtaatgtgcttgcccacgtaagacgcttcgacgtgtcccgaccatctgccggggaacaggtagccgccgcacgcttgtatctcagcggccaaatcgtcagggcacggcactatgcgctgcttgtcgcccttgcctcgcacgataagcgacttgcctagcaaatcgtccatcacatcatcactgttcacggcggcaatctcggaacgacgtaggccgcattcggcggcgagccgtatcatgcgccgttcatcttcggtggccttccccaacgccatgagaatatatttgtcagggcaagggtgggggtgcgcctgtggcttcttcaccttcggcaccttcgccgtgggattgtcaccacgccgacccgtctcatagaaccagcggtagaacccggctatcgtgttgcgatagcccttgcgcgtctcgggtttccaatcatgcgccgcgaaaacccgcgttatctgctcaccggttgtctccatcgggcttggcagctcacggcacaaccgcgctatcttgtaccggcgcgacctcaccgtgtcgtcgctgaaaccagcggccttcaacgtctccaaccagcaatcaacatcttgcgcccacgcaacgggcataaccattttcttcgccatggccgcacgctaccaccatgcgcagctagtcaaccagcgcccagtaatcgggatatatccaaggtggtttagccccagaggtccatggttcaaatccatgccccgctacgaacgtggttatatggccgctgatttcggtaccgaaatcagcggcctttccgtttaccgtggcgatatggatgaaaggcgatcaggcagctacggtgcccagggaagtcggcgatcataaacgtctcgtcattttcatcgcggatcttcagttgtctaatccacgggaggcgacaggcgtgaagtttctcaacgaagcggaagccgggcacaagtcgtatgttacgatcgacttcgtgcccagctcccgttcttctgctcagaagcggagtgtggttcaccatccagccgacatcatcggcatcatgccgcagcgggtcaacgtatcggccagcgcatcgtccagtgcttgaatcggtcatagcgacgacgccaccgaacgacgatggacagtatggcgcctatcgccagagctgacacggccagaaccgaggcaagcgacacatcgccacccgtgacgggcagtgacgggcgagggttgggcgtggttgcctccgccggcgccggcggcgtctcgggtttctccggttcgcacggtttctccgactcgcatgggggcaacacccgcacacgctcccaggcatcgtcataccggctggacgccggggaaacacggtcatccccctcgaaccgccagacgaacacgtaccacccaggccgttcggcggtcagatacataggagcgccatgcgcgtccaacgccccggcgccgattttgaacgtgccgttcatcgcgggaatctcccaggtggccagcaaccggtggttgtcgtcttccgtgggaacctctcccccggatggcttgtacgcctcatcgttggaggggttgtcgggatcgccggaccaccatacgctcaccgtcgcatacggccgatccgccgcgaactcatactcttcgttgccggcatactggccatgatccgcagggaatcccgatacggtaatggtgtcgctgagctcggcaccgatatccgccgaatgctcagtgaccgtcgacatgacttctagcttcctgcgacttgtattgctttccgtagcctccataaacggacttatccagtcgcctataaggtattcctgcgcctgtttgctctgctcggaccgccgaaacacccatacccatgtgccaaaaccgctattctgcttggtccggtaagcggcaccgtcatccggcttggtcatggcctgcacacgtgcctgctgccccaccccggtgaaagaggccttgccataggccaccggctcataacccaaagtcgccaatcgcgcaagaaaagcatcggcgctctcttgtgcattcggcgtaatgacattgcccacatcgcccgtatcaagaccatcgaaatagtatccgcgggcctgcaattccaaatcgggcacccaataactgtccgcatccgccacgccactggtcacgtcatcgaacaccggagaagccacatcaagcaccttctcggagaccttggtggataccgccggaacaaaatccttacgcacccgaaatgtcgtcgacgcgccgccagtggaagccatcgagtcaaaggccagcatgtcctgagtgctgtccatgacgtgcatccgcccatactcgtatgtggtgttcgccgtcacctcgccggcgccggtcgcctcccacgcgatcgaggacccggcgctcgtcgacacccccgagaacgtgttgccgccttggacgaaccgcgccgccccctgcaaggtgacggtgaacggcactcccgcgatcgcgtcaccggcgcggttcaccactttcaccgagatggaaccgctgcgcaaagcctcggcatcggtgcgttccaccgtcgtgcccgcaggcgtcttgccggccgattgatcccatatccgggccgccttcgccacgatctcggggtaccggccttgaatgaccgccatctgtctcgcccactcgtcccgatcgcgcccgaagtgatcctgcacgatgatgccgatcgccgcatgggtggcggcatccgtgtcgcggtaccggtcaaggatccatgccatacgccgggcgttctcatcggaggcaagcaccgtggtggggcctatcacatagtcgctcagtttccccgcttcgatgcagtagtacttgttgcccgaagcgtccagccccgcgacaccgacgtaatattccatatcgttgtatggaaacgccacgtgatatctttcgtcggcgggcgtcaacgtcgcggcatacgccgtattcgccgagccgaacaccactcccaccattattatcagaccggtcagcatcgctacgatggccatgccccgttgccgccatgtcgttatcatcattcgtcctttcctggtacgtttccccgcatactgcactgtgtgcgggtaggccacgatcatggcagattttcattcgctacagccggtttttcgacctatgtggtccgagcttgccgtttgccggcgagttgtggataactcttccgccgagttatccacctcatgcggttgaccgaacgtttacctgatagttatccacaatgcgcaacatatgttcaaaagcccttagaatagggccttatggcagcagtacaacatcgcgcgaccacgcgcactagtaataccgataacagcaccacgaaaacgaagtcaaaggcgacttctgcccgaaagagccccgcaaccaagcgcaagagagtcagcgccgaaacggcacgcgccgcagcagcgctgaaaggcctggctgtcgaagcccccgcaccgtccatcgaagcaaacgagcccggccagttcggccgcatcaatgtcatggacatcactcccgccgaggagcgcggcatcttccccgcccgtgtggaactcggcgaaccgtttgagatgaccgcccaggtgttcatcgaaggccgtaccaaggtgggtgccaccgccatcgtgcgcaacccgcgcggcaaggaaaccatgcgccgggccatgacctgcgtaaatcccggcctcgatcgttggaccgtgatggtcaagtgcggcgagcacagcgatctgaagccttgggaggatggctacgcggccgtcaagcgtcagctcggcgaatggaccgtgaccatcgaaggttgggaagacgcgtacgtctcctggctgcacgacgcccgcatcaaggtgcgtgtgatggacgacgtggacaacgcactcaattccggtgccgagttgctggcccgttgggccgaaaccccggacgccggcctgaccgcacgcgatcgcaagaccttggagaaggccgctgagaccatggccgatcagacgctgagcgccgaggatcgtctcgccgccggcgacaacccgaccatcgccgccctgcacgagactcacccgctgcgcgacggcatctcccccagccagccccagcgcttcaaggtggaacgcccgaagtccagcttcgcggcttggtaccagttcttcccgcgttccgaaggcgccaccatcgatccgaacaccggcaagatcattcagggtacgctgaagacttcgatggccggcctcgaacgcgccgctgccgagggcttcgacatcgtctacctgccgccggtcttcccgattggcgtgaccaaccgcaagggccgcaacaacacgctggtcgccggccccgatgacccgggctccccgttcggcatcggctccgagctaggtggccacgacaccgtggatccactgctcggcaccatggacgatttcaaggccctgtgccagcgtgcacatgaactgggtctggaaatcgcgcttgatttcgctctgcagtgctcgcccgatcacccgtgggtcaaggcccacccgaactggttccgccacaagccggacggctccatcgccttcgccgagaacccgccgaagaagtatcaggacatctacccgatcgacttcaacgccgacatgcccggcatcgaaaaagaagtcgaacgcatcatgaatctgtggatcgaggcgggcgtcaccatcttccgcatcgataacccgcacaccaagccggtgcgtttctggcaggacgtgattgccgccgtgaccaagaagcacccggagatcctgttcctggccgaggcattcacccgcccgggcatgatgcgcgccctgagctacgtgggcttcacccagtcccactgctacttcccgtggcgcaacaccaaggacgaactggaagagtatctgccggtcaccaatgacgacgacggctactaccagcacaacaccttctggcccaccacgccggatattctcaccgcttacgtgcgagacaacggcgtagccggccactgcgtgcgtgcggtgctggcagccatgggctcgccgtcctggggtatctacaacggttacgaactcatcgagaacaagcagcgccccggcttcgaagagcagatcgacaacgagaagtacgaggtcaaggttcgcgattggagcaaggccaagcagtacggcgtggccgagatgctcaccgcgctcaacaagattcgtcgcgcccacccggccgcgttgagctaccacaacctcaccgtgctgcctacgtccgacccgaatattctggctttcgcacgccacacgccggccgaactgaccggtaccggccaagcggacacgctgattgtggtcgtgaacctcgatggacacaacgcacaccagtcgatgattcacctggaactcggcgagctgggtctgcccaccgaccgcccgctcaacgtgcgcgacgagctgaccggccgcgaattccagtggggttgggacaactacgtgtctctggctccttgggcggatgtggcccacatcctgtccgtgcagtgatgcggtactgcaacggtaatgcaacagtgatgccgttgacgtgcatgggtttatcgtgtgcgtaaaccgctagaaatcctcccctcaaggggaggatttcgtctgtttgggcatagtgtcggcataatctcagcacggtttcttgagttccgcacctgttttgcaggcgtaaacagggtattgtggtgagacgataacgtaactgtcgattttcaaggagaaatgacatggcagaaaccttcaacgtcgttgtggaaattccgcgcggctccaagaacaagtacgaagtcgatcacgagaccggtcgcgtcttcctggaccgtaccctgttcaccgcaatgggttacccggatgactacggctacatcgacggcaccctgggcgaggacggcgatccgctggacgctctcgtgatgattccgaactccgtgttcccgggctgcgtggtcgagtgccgcgccgtgggcctgtaccacatggtcgacgaggccggcggcgacgacaaggtgctgtgcgtgcccgccgacgttcgtttcgatgacatcaaggacatcgacgacgtcaacgagtaccacaaggccgaaatcaagcacttcttcgagcagtacaaggctctggagccgggcaaggaagtcctgccgggcgactactggactggtgctgacgccgccgaaaaggaaatcattgccgcgcgtcagcgtctcgccgattccgagaagtgattcgattctgaatcgttgacaggaggccccttcgggggccttttgttgtatttgtggcaaagccgctctactctccctcagtcgcagtttcactgcgccagctccccaacagagggagcttgtattttgtgatacagtaatgttttgtcttttcaactaggcgtaggcggcgtgtaggaacgctggtcgaggcccatcgcacggtaatccggcgatgaaccttctgtcacaccatgatttcgataatcattcaaatcctgcttatttctgtttccgtagctatggatgcattcgccgtatccattggcaaaggcctgaccgtatcccgcgtacgagtacaagacgccgtgaaaagcaccctctggttcggcggattccagatgctgttccctattctcggctatttcgcggcatctacattcagcaaatacgtaacccaattcgaccattggatcatcttcgccctgttggtgttcatcggcggcaacatggttcacgaagccttcgaagaagatgaggaaaactccaaggagaccgcccagttcgattggaagcatatgcttcccctggccgtggcctgcagcatcgatgcgttcgccgtgggcgtgagcctggccttcatgttcaccaaagcccatatggcattcgccatcctcagcatcggtgtggtcaccggactgttctccgctgcgggcctgcacattggccgcgcgttcggttcccgctggcagaagccggcgcagatcgccggcggcgtggtgctgattctactcggcatcaaagtgctattggagcatttgggcgttatcgcgttctgatttagtgccataagccccttcaccagaaggggctattttgtttgatttcaccgttccaatgcccgacgtaggattgggatagaaattcgattatctgagaggcgtatcatgaccgagatcacccaggagggttggaagaacaaagctctgagcatgttgttggcccaactgacgtcctatgtactgttcatcgcagccacggtcattccctcccctggcaccgtccccatcatccctttgattatcgccgctctgacgttggccgcatttgtcgtattctggccgttccgcggcagcatactggatcgtatcgtcactttggtgtttggcgcgatttctctgattttcgtcatcgtacctttcccgaccagcgaggttccgccggatcagaccgctgcggatggctcggtacttccttggtattcatgggcactggccatgggcctgctgctggtggtgctggtggtcttctccttcggacgccagatggctcgtgagaagcgcgaacatcttatccgcgcactctctcacgccgtgacttccggtgtggcagctctcgccgtggccggctggtgcttcctacctgatttgggcgcgatgctcgccaagggcaccgttgcgggaaccgttgccctgatcatcctcatcgttttggcactggctttggccgtggcttccacgttgtgggtgcgcgacgccgatccggacccggatatccgttatccgtggatcggtaccggcctgatgccggtaatgctgatgggcgtgaccatcgccgcaaccgcactggtgctcggccgtatcatcggttgatggacgtccaccgttccatattccgcaaacttgtaacctatgtgtccactacaagcgcgtagaataatgaaaaccgtgcgaaagcggcataacgccgctgacgactcgtacagccacaccgagcaattgcgtaacacattgcaggataagggggattagcgtgacggatcttacgttgatgactttcgccagcgaccccgccaccgttttgccatcactcgccctgctttctcatcgcgtccgcgtactgccgatggatgcagccagcttggtgaagatgccggagaacaccattctgtttctggatgcacgcgatgatctggcgaccgccaaaaccttgtgccgcctcatccacgcttccggcctgtccacgccaatcgtgctggtgctgaccgaaggcggcttcaccgtggtcaactcccagtggggcattgcggatgtggtggtcgccaccgcttccccggccgaagtcgagggccgattgcgattggtctccgagcgcggcaacgctcccgcagccgcagcagccggttctcccgccgaatccaccaccacggtggaagatggccagattcgctccggcgacctcattgtggacaccaacggctataccgcctccctgcatggacgccccatcgatctggcatacaaggagttcgaactcctcaagtacttggtccagcaccccggccgcgtgttcacgcgcgcccagttgctgcaggaagtatggggctacgactactacggtggcactcgtacggtcgacgtgcatatccgtcgtctgcgcgccaagctcggcggcgaatacgaacacctcatcggcaccgtgcgcaacgtgggctaccgattcgacccgccggagacggataaggaaactgccgccgcacagcaggccgccaaagcatcctctgccgccatcgacaccgatgacgatactcccgatctcaacaccgtcgcctgacagaccagcggcgctgcaaactatcaatcatcgatattacgccgcttaggtccatacgatgagagaaaccaaatccgcgcgtctcacgcgcatgcatgacgaatacgacattctgcgccaggtgattccggcacccgcttgcgcactgcatttctcgaatccgctcgaattgctgatcgccaccgtgctcagcgcccagaccaccgacaagcgtgtcaacacggtcaccccggaactgttcgccacctaccccaccgcccgtgacttggcggccgcaaacccggcccaagtcgaagacatcattcatccgctggggttctatcgttcgaaaacccagcatctcatcggactggccacggcactggacgaacgattcggcggcgtggtgccgcgcacgatggatgaactgaccagcttgccgggggtcggccgcaaaaccgcgaacgtcgtgctcggcaacgcgttcgatatccccggattcccggtcgatacgcatgtgatgcgcgtaaccggacgactgcgttggcggtcggattggcggtccgcacaccccgatcccgtgaaaatcgagaaggaaatcacctcctgttttccgcccgaagagtggacgaatctcagccaccgactgattctgttcggccgggccacctgccacgcacgtacccctgactgcgccaactgcccgctgtccgacacctgccctagctatgcgccgcccgccggcaagagcacgtccaagcgctaactcatacctcatcatggtgaattgcggattctaggctgaatccaccgctagactgaaaaccatgcagcacagcaagcgggacaatacatggtccaagtgggggatttttctcggagtcgccgtggcactcggcgcactcgtggttgtgggatggacgttcatgcaaaaccggttccagccgggatcatccctcgatgccgatgtgaccattggcatcgacgatatgccgcaatccttggatattcggtccgattcctctgcggcagccgaacgcctgctcgtcgacaatgtgtatgagacattagtgaccgtcgatcaagacaacaagcttcagccgggactggcgacaagctggaagacttccgatgacggactgaccgtcaccctgacactgcaatcgggcgtcaccttctcgaacggccatacgttggacgcctcggacgccgtgtggtcgttgcaacagaacgtgaccaacaaggtggcggacgtcgacgaattgggcgatctggcgtcggtcgccaatccgaacgccaccacggtggtcattacgcttgccaagcccaatccgacgctgctgcgagcgctgtccggcagactcggcattgtctacgattccgagtcgtccagtgccgattatcaacgcaaggccataggttccggaccattcaccgtggccgatttccagcctggccattccctgaagctggcgcgcagcgatacctaccatggcaccaaagcggccagcaatgtcgttgaatttatgcaatactccgacgccgatgcgctcagcaaggccctgaccgacggcagtctcgatatggcggcaccggtttcggcttcgacggccaccggtttgaacggcaaggatggcctgaccgtcaaggagggggccactacggataaggtgctgctggcctacaacaacggcaccgattcgctgctctccgacgaacaggcgcgtaaagccttccgctatcaaatcgacgcagccggcatcgcctccgcccaacccgacgcagccggagcattgggcggccccatcagcctgctggaacccggatacgaagatttgaccggactgtacccgcatgacgaaaaccaagctgggcagatgttctcctactttggtgcgcaatacctgactacggtgaatctggtggttcccgaagaataccggtcgttggccgaaaccatcaagcagcagatcgagcggcagccgcgccccacggtgaaccttgaagtgctctccgatgaggattatgccaaacgaatcaaggacggcaaatgggaactgaccgtgatgagcatggacggcacggatgatgccggcatattcgccgaccccgattccatgttccattacgaccataccgaagcgcaacaggcctatgcggatgctcgcgccgccactaatgacgccgattatgaggcacgaatgaaggcgtacgcccggctgatcagcgaggatgcggccagtgattggctgtatacccgcaaatgcttcactgtggcgtccaccaaggtctctggctacccgacctcgatgatcaatcgccgcatgccgctggccgggttgacggtgaagtaggcaaccttcagtcacggacgggctacgcccgatagcccttggctcactatcgttcgatcgttcgtacctcgcctgcgaacagcctactgggctgtttactgtacagttcggcttgtcatgcaacgtgcataaactttggccttatgactgaaggcaaatccatcatcaacgccaacctcaccccgctgcccgacaaggtcggcgtggacggacttgaggacaagtggcgcaccgtctgggatgaagacggcacctacaaattccgcaacacccgcgaccgcaaggccgtctactccatcgacaccccgccgcccaccgtctccggttcgctgcacgtgggtcacgtgttctcttacacgcacaccgatgtgattgcgcgctacaagcgcatgcgcggctacgacgtgttctacccgatgggttgggatgacaacggcctgcctaccgagcgccgcgtgcagaactactatggcgtgcgcgtggacgtgtctctgccttacgacccggacttcaagccgccgtttgaaggcactgatggcaagaagattgacgccaaggatcaggtgccgatttcccgcaagaacttcatcgagctgtgcgagcgtctgactgctcaggatgagaagctgtttgaggccctgtggcgcaagctgggtctgtccatcgactggtcgcagacctaccacaccatcggtcagcacccgcagcgtgtggcccagaaggccttcctgcgcaacctcgcccgtggcgaggcctaccagcaggacgcccccggcctgtgggatgtgaccttccagaccgccgtggcccaggccgagctcgaatcgcgcgaataccccggcttctaccacaaggtggccttccgctttgaggacggcaccccgatctacatcgagaccacccgccccgaactgctggcggcctgcacctcgctgatcgccaacccgaacgacgaacgctacaagcagtacttcggccagtacgtctactcccctctgttcaaggtcaaggtgccgattctggcgcacccggccgccgaaatggacaagggtgccggtatcgccatgtgctgtacgttcggtgatgtaaccgacgtcgagtggtggcgcgacctgaagctgcccacccgcccgatcatccagcgcaacggccgtatcgtgatggataccccggactggatcgaggacccggccggccgcgaggtctttgccgaaaccgctggcaagaccacgttctccgcccgcaagatcatcgtcgacaagctgcgcgagtccggcgatctggacggcgagccgaccccgaccaagcgtatgacgaacttctacgagaagggcgacaagccgctcgagatcgtcacctcccgccagtggtatttgaagaacggcggtaccgacgccaagctgaacgccgagcttatcgagcgtggcaaggaactcgagttccaccccgacttcatgcgcgtgcgttatgagaactgggtgcacggcctgaacggcgactggctgatctcccgtcagcgcttcttcggcgtcccgttcccgctgtggtacccggtgaacgcttccggcgagccggattacgatcacccgatcactccgtccgaggatcgtctgccgatcgacccgaccatcgacgtgccggagggctacgacgagtcccagcgtgatgtgcccggtggtttcaccgccgaaaaggacatcatggacacctgggccacctcttcgctgaccccgcagatcgtgacccactgggccgagccggacgaggcctccaaggccctgttcgcttccaccttcccgatggacctgcgcccgcagggtcaggacatcatccgcacctggctgttctcgactgtggaccgcgcgcacttggagaacaagtgcctgccgtgggcccatgccacgctgtccggctggattctggaccccgaccacaagaagatgtcgaagtccaagggcaacgtcgtggtgccgaacgagccgatcgagaagttcggcgcggacgccgtgcgttactgggccgccgccgctcgcctaggcctcgatgccacgtacgacatcggccagatgaagattggccgtcgactggccatcaagctgctgaacgccaccaagttcgcgctggccatcggccgtgaggacgagaaccatcacgtgggcgctgccgccgaggccgcgtggaacccggccgatgtgaccgaaccgctggatcgcgccgctatggccaagctggctttggtggtgcgtcaggccaccgaggcgctggaatcctacgagcattccaaggcgctggaagtcatcgagtcctacttctggcagttctgcgacgactacatcgagctggtcaagaaccgcgcctatggcactccggacgagcacggcaatgtgccgtccgagaaggctgtgaagtccgcccgcaccgctctgggtctgggcctggacgccttcgcacgtctgctggccccgtacctgccgtacgccaccgaggaagtgtggagctggatgcacgccggttccggttccgtgcatcgcgccgcctggccggtcgtggacccgtatgtcgaggccgccaccggtgcttcccccgagctgctgacttgggccggcaaggccgtggagcagctgcgtaagatcaagtccgaggccaaggtctccatgaagaccccaatcctgtctgtggcactgtccgctgcttcggaaggtgtggaagcgattcacgccgccttgggcgatatcgcgcaggccggtcgcgtggtcggcaagttcgacttggtggccaagcacgccgaggaatccgccgccgaaggcacgcccgaaaccgaggtcgccgtcgaagccagcgagctcggtgagccgccagctaagaagccaaagcactgaacgttacgcacaacaacagtaggtctcacggcaatgccgctcgttccgagcctacgggaagcccaccgggcttcccgcttaacggctcggccagctaagaagccaaagcactgaacgttacgcacaacaacaaaagaggggaacctattgaggttcccctcttttgttttttgacgttcggatgacacgactgtgggacggcacgcaaatatcccgcatacaccatcacaccgtcggaatcacgatgagatatcgggtttcggcggttttttgttgcgtattggggctgtcgagctgcgcgacggcctgcgccaagagcgtgccagcatcactgattttcacggtctcattaatcagcgcgttcatatcgtgcttgaacagcgtgccgccagtgccaaagccgaacagtactggagcggtgtcaagattgttgccggaatcgccagtgtcgctcgacttggctgagtcgttcgttcccgaaccagcgctcttagacgagtcggacttatcaccaccaccgatggccgaagtaagaccacccgcatagttcatcacatcgccagcagccatggacatggtgtcatcgaccagtgaggccttggaatgctgcgactgctgctgttgcgcggctttggcctgcttacgggcggcatcggccttacgcttggcttgggcggcccgggtcttgccgtagaacgattgcgattgcgaatcgaccaggccggtcagtgcctgagcctcggtcaccggatcggaagagacatcaccggacgagccatcgccatcgctgccggaagccgaggacgcgactccttcgaactgatcggagaatcgcaatacaatctggcgcaaggccgtggctttgcccgtatgctcggaggcggtggcaagcgtgctcatcgcggcatcgaccttggattgagcgtcggcgagttcatcgctaccgttggtttcggcgatggcttggctctcgtaagcggtggcgcccgaggacgtgccgccggtcagggcgctcaaattggccgtgtagacgtccgtgtatttcatcgaatacggaatcattgcggcggagagctggctctggccatcggcgtattgcttggagccttgagtggcttcctccgaagcctcggcggtcagatcatccaccagtccggtggtgccttgctgctggatgcggcgaatcacctcgtccaacgcatcgaccgcaccggcatgctgatgtgcggcactgacgttgttcaccgcgttggccaagtcgagtacggcttgtgccaaaggcgtgtccccggacagttcgccggccgtgcccatcaacgccggcaactgggtggaggtgccaatcgatccagacaggtgcgtggtatatgagcccacatacgcggccatatagtcttcaaacgtccgcttatgggcggtttcgcgttcggccactacagacttgttcagcgcacgttcgttatcgcgcagggtttgaagctgctcgatgagctgttgatgctccccggaaccggcgtcggtcagtgaatcgaccagtgtggcggcagaggcggtgagttgggcgacatccgtatcggcagcaggctgtgcggcagcattcgcagcattcgcggcatcgggattagcaccaactgccggactgctggaattggaaggcaatacggcgagcgccacggaactcatggagaagtctttggcgttcatatagcagctgaattccaagccggttgcggcttttccagctgcggcgactacggtattggaaccttgcgtggttaccgtaatggagttgtcagcggaaacatcatcggctacctgcgtaggcacggtaaaggcgacaaccgggatcgtacggttggcttccttggtttgcggcttaatatcgatatacacgccgatcagtccagatgcgccggcaacctcgtttgcctcgacgtttggaccgtcaagcgagtaggtgacgctgactttccatggcagggtggcggcggaagcggggatacgagaaaccttggacgtgccggaatcactattggcggaatcggtatcagtggaaccgctattgccggaatcggcactggcgccattgccggcaccgcccttccctaccacataccaacggaccggctccccttcggcatcggtgacggcgtacatatcacttgccgtagcgagcaccggaccgtaatcaaccggagtcggacgagacatccaagcaccgccgagaatcgaagccacgcacaatgcgcaactgaccagtgcggcaccacatctcatctacgtatcccattcatacagtcggccactatgggcattccattcccgtattaatgtagtcgctgccggcaacttgccctatagacgaatatccgaaaggtgcccattcgctgcgggcgaatcaggcgaatacgtcgagtacgcccgggtcaccaccggcatcggctatgcgctggtggcgcttcttggcttcggtaaccacgaattcacggtacatttcggcaatttccggatcaagcccggcatcgatggcgatgcggtggaggcgttcgatctgatagtcctcacgcttggtgtcttcgggcgcgaatccggcgttggctttgagcacgccgacctgcgaggtggccttgaaccgctcggccagtaatgcgatgaccgccgaatcgatgttatcgatggtttggcgcagcgctttgatgcgcgccaccgcttgtgcggtttccgggtgggccgccgcctgggcggagtcgatggtggtcctttgccagtcgctgctcgtttcgctcatagattcgaggatactcccgattacggctttgcacgatgcgcaaagtcagatatctcagatgtcatagtcgccggtgaggatatggctggcatccgcatcgccgaacatggccgcaccactgcccactcccaaaacaatcgaacccagtgatgcctctttcatctcatatatcgtcagcgtgcatgtgaacgttgacggcaatactacaactgcaatgtgatagttgatgtatttgcatcagatacgacaagggctgcaccccgtatcaatcagggtgcagcccttacactattgttcagcggtctgatcagttgccgttgaccgcgttgccggtgttggcctgctgcacgatggcggcgaggaagtcgcggttggtggcggtcttcttgaggcgcggcaccagcgtctggtaggcctgctcgggctccatgccgcccagcagtcgacgcagacggtagataatcggcagttcctgcgggttggtgatgagctcctcgcggcgggtgccggaagcgttgatgtcgatggccgggaacagtcgcttgtccgccagctcgcgggacaggcgcagttccatgttgccggtgcccttgaactcctcgaaaatcacctcgtccatcttggagccggtttccaccagcgcagatgagatgatggtcagggagccgccgttttcgatgttgcgggccgcaccgaagaacttcttcggcgggtagagggcctgcgcgtccacaccaccggacaggatgcggccggaggcaggggctgcgatgttgtaagcgcgagccagtcgggtcatggaatcgagcagtacgaccacgtcctggccgagctccacaagacgcttggcgcgttcgacggccagttcggcaaccgtagtgtgatcggaggccggacggtcgaaggtggaggaaatgacctcgccctggaccgtgcgctccatatcggtgacctcttcgggtcgctcgtccacgagcaccaccataaggtggacctcggggttgttggcggcgatggagttggcgatgttctgcagggtgatggtcttaccggccttcggcggggagacaatcaggccacgctggcccttgccgattggggaaacgatgtccatgatacggccggtgagcttgttcggggcggtctcctgcttcaaacgctcctgcgggtacagcggcgtgagcttggagaactgcggacggttgagcgcttcttcaacgctttggccgttgatggaatcgatggcctgcagcggcacgaacttctggcgctggttgcggcggtcgccttcacgcggggcgcgaatcgaaccatgcacggcatcgcccttgcgcaggccgtacttcttgacctggcccatggaaacgtacacgtcgttcgggccgggcaggtagccggaagtgcgcacaaaagcgtaggagtcgagcacgtcgacgatgccggccaccggcaccagatcctcctgcggctcttcgcggcggctatcacggtcattgcgatcgctacgattatcgcgatcatcatagcgacgatcatcatcggcgttgtcgcgatcacggccacgcatgcgacggttacggcgatcgctgcgatcattacgggtatcgcgatcgttgcgatcgctacggtcgcggcggttacgacgcacgaactcgtgatcgtcgttctgctcgccgtcttcggacgtttcctcgtgcttctgcgtgggcagcgtggccaggatatcgtcgaggtcacgcacggtttcttcgctgttttccgcagtgcgacgacggcggcgaggctgctcgtcctcatcatcacggactcggcgaatcagcggaacttccacgtcctcgtgacgctcgcggcgacgctcggtaggcgctgcatctcccaaatcgagcgtggccagcagatcgccggcctcatcggccttcttgcgcggcttgcggcgagcgaaatcgggctggtcgtcatcgcgacgacagcgggccgcacgcggttcggatgcggcatcatcggcggccttacgacgggtgcgtcgcggttcggtctcgtccttcttggcatcgtcggccacgggaagcggcaaatcgagctgcggttccgtggcagccggagccggagccggcgactgggtggccacgtcagcattgtctgtggtgttggcctcagcggcatcggactgcggagccttgacgaccttggcggttttggcggccttgggggcgcgcacggtcacaccggccggcggctctccaccattgcgcgccgcctgcagggtggcgagcagctcgggcttgcgcatggtcgacgtgccgcgcaggcccatctgtttagcgagctctttgagctcaggcagcttcatatcctcaagattctggctatttgccactggttgccctttccataccgaacagacccatgcctatccaggcgttaagagtgattattgcggttgcaccgctcatgaatgttcgctgcgtctctgagtctctgcgaacttcgttcactgtacaacgccaactcgaccaacgcaaaacggcccgccgaaaaccaaaaaagctccctctgtgacgagggagctcaacaaggtttattcacttttcttcgtggtaggacttttcggtgttgacggaccacacgttcttcttggacgtcttgccggtcttgatgttgccgacggcctccatggcggtggccatggagtggtccatgttgttgtagcggtgctggccgttacggcccacgcagtacaggttgccgaagccgtcgaggtactcgatgagctcgtccatgtgctcataggtgtcgaagtaggcggggtacgccttcctgacgcgctcacgatgggagtcgatgacctcgtccggaccgttgatcacacgcatgcgggtgagctcggaaatcgcgaacttggtgacatcctcctcgctcatgttccagaacgagtcgccctcctcgcagaagtactcgagaccgatccacacggtgtcgtccacgtccttgaccaggtacgggctccagttgttgaagatctgcagacggccgaccttgtagcccgggtcctgcacgtagatccagcagtccggcacgatcggcggattgccgagggtggggatgctggtggtgttcttgagcttcaggtgcttgaccagcaggcccacggtcacgaaatcgcggtacggcaggccgttggccacctcggtcatatcggccggggcgggcttggaatcaacggcctcaggatcggcgccggccgcgtcgatggcgttgaccaggtccttgaccggcatcgaggagatgaactggtcgccggaaagctcggtgcggttgccctcggaatcctcgtacaccacggaagacacggcaccatcggtctggcggacctcgaccaccctggcgtcggtcagcaccttgacgccggcggcctcgcaattggactcgacggtctcccacagctggccgggaccgtacttcggataccagaactcctcgatcagcgaggtctcgacctccgcgttggagcgcttcttgggcagcagcttctggaaggcgttcttgagcacgcccatgatggacaggcccttgacgcgctgggcgccccagtcggcggagatctgggaggggtggcggccccacagcttctccgtgtagccctcgaagaacatcgaatacagcttgcggccgaaacggttgatgtagaagttctccagattgtcttccggcagcttgtggaacatggacttcaggtagctgaagccggccaccatggtgagcttgaagcccatggccttcaacgtgttggggctcagcgaaatcgggtaatcgaagaagtggcggttccagaagatacgggacactcggtggcgcttgagcatcaccttgtcctccgtctccggatcggggccgcccggctccatgtcgtggtcgcggccgagcttcttgtcatcataggagggtgcgccctgcaacggcagaacggtcttccaccaatccatgatgcgttcgtctttggagaagaaacggtggccgccgatatccatgcggttgccgttgtgcttcacggtgcgcgagataccgccgaattcgcgggtcccctccagcacggtcacgtcgtacttgtcggcaccgccgtccttgatgagttcccacgcggcggtaagtccagccggaccgccgccgataatcactacggattgcttgtcggtcattatgctccttataaacgcaaaatcagagacagtctactagaagccccggaatcgcacaccgaaagatgagcgaatgcttacagaattctcccgatatacgaccgatgcgccgtctttccatcagcagaaaggcgacgcatcgaatcgtgaggtaggggtattcggcaacgttgcgtcacacacagcgcggcgaatcggtttggtcttaggctaattcgtcagcgacgaactttccatagattcagcgagatgcctgcaagtgcaagcagcatcataatccccgcaacaccagtaacggcaacaccagtacgactcaactcgttttccgtaccattagcctgagtgttgctgggctgatgagttcccgcaccattgttattcggagtggtactcgttccttcaccagtgttaggtcctgtgcccggctgcgttgtggaatcatcagtcagatgcgcatcgtcgcctagggtttggtggtcggaggccaagcaacttttaagctcagtgagcttgtaccacgtggaaccatcggcaatcggcgtgcattcggagcggaaggcgatttcctgctcgttgtagagcatacgaacgagcggcgtgtaggcacggccggtcttcgggtcgttgccggatttgacggcaacatcccactgcacattagcggccatcggagtcaccgattcaccgcgccattcattgttggcgtaggtgtacacgtcggtggtgctggcggccgcctgctggatggaaccgggaaggccaagcagcgcggcgaacggcatcatcgtttcggcatgggcaaagcggaaagtagcaacggtggatccgccgtttacgcgctcatcaatcgacgagaagaaatcgtcaagcagcggctgtgcgattgtgtaggtctcgtcttggccggcgtagctcgggcccttctcgtagaagtcctcggcgtcaagcgcccaggcgaacaacttggcgtcgtctgcctgctcaccttggaagtactggttgaagtcgaaggtatggctgccggtgttctcgttctccatatcagcggcgatgatgtacaggttgtacagatccatcgcggcatcgtattcggaggcgatcttcttcttggctgcgccgcaggcgtcggcatccttgctggggtcggctcccggcgcgcagttggcctcgccgcccttggtgccatcgacagtgttgtaccaggcgtacgtgccgtcggccagtttggcgaggaagtcatcggtgaagatttgtgaaagcaaatcgtgagaggctgttttcacgtcctcgttttcggcgatggtttgctcagcgcctgcgataatcgcatcgttttccacgaagttctggtaatcgtcggcacgctgcttggcctcaccggttttctcagtgccgtccgggttttcggacttgtggaagtacagcgtgttcggcgtcttgtcgaaagccgccgcctcgccggtgccggccggatcggcgggcgtcacagtgctgttcgccagtttattgttcgaggccgcgttgaaaccgcgagcaaaattctcgcctgattcagtagcgcgggcttcgccagaggactgataggcaatcttgccaccgtccttggctgcgttgtcgaacagcgtcttgttgcgctcgtaggcacgtgcgccaatgccctgatgttggtcagcaccctgaccggtgagcataccgtagccattctccacatttgcggcggtgatggctttgagattcttcatgaattcggacttgatggcatcagacttaaaaccgttatccgcttcggcggcttcggccatcttcataagcaatgcgtcgtatttgtagctggacaggccgcgtgaaccgtggcgagccatcgactcggtgtataccgtttcgtagccttccggcgcctggctatagctggcagtggtcgcttcgctaggtgccacatatggctgcttgctgctgtaatactggccatcggtctccaaagccatggcgtgcggaacggtcaggatgccaccggccagcaatgtggcggcagcaaccacgcccgcgatggagcccttaaggccctgctgcatatggtgtgtgttcatgcagcattttctatcagccgcaagcaaacaagacacacgatggcaaggttacgagtctgaacttttgctatgcgttgtatgaacaatgcgcgacgccccgccgtaagatgacggaatgccgcgcattgtcaatacaggctgtatcagacgattgcctgtcagtgaatatcgtcgggaatgtcgatatcggttttctggacttcttcgacgttcacgtccttgaaggtcacgatgcgcacggacttgacgaaacggctggaacggtagacatcccatacccatgcgtcagtcagctgcacatcgaaatacacgtcctgaccagcggaacgcacgttgaaatcgaccttattcgccaagtagaagcgacgctcagtctccaccacataggtgaacagcttgatgacgtcacggtattccctatacagcgcgagttcggcgtcggtttcgtaattgtcgagatcctcggcactcatgcttgtttactcactcactttccgtatcgcgtttgcggccgcggcccagcgtacgccaccatgcttcctttgagggcttgcgttctgcctgaccgtacggccagttgctttcctcttcgagactgtggcgcgcgttcttctgcgtatcgtcgtggtgctcggcctgtggttcgactggctgtgcggccgccggcgtctgggcctgggactgcacgtcactcgtcgtggcgccggctgcctcaccacgctgtgccggctcgggttccggcttgttctgctggatggcgatggaatgctcgcgcgcggacagcgcttccttgacacccgggttgtcctcaatcaagtgcatgccaaaagcgtcaagcgaacgaatcggatcgtactcgtcagccaacgtgtccatgacgataaggtcctggtatttgttgttttcggcatcccacaacgcgtcgcgcgaggtgccggacggcacgaagccgagcgactggtagaccgaaatcgagcggctgttcttttccggcacgctcacccagatgcggtgcatgcccaagccggccggttcgggcgcgaaaccgtaggtcatcacacgcggcatggcgtcacgggagtagccgcggccacggtattcacggcccaagatgatctggatgcgggcggacttggaccagccgtcgatgtcgataaggaaaatcatgccgatgacattatcggtgctggccgcatcgagctgaccgtcatcgtcatggtcggcgtcagtcaatacggcccatgcgatggtgcggcgggattccggatcacccacaccggattcggcgggtgcctgaccggcttcccaagcctgggagcggcggacccacgtgtgtacgatggcgcgttcggtgaccgcatccttacctgtgatcttggatgcgccatagaaggcatcaagttcatccaaacgaggcaggtcctcgacggtggcggggcgcaggtgcaccatttcgccacggattggcggaatgacgatgctctgtggcagatcgcgcttcagttgcgcttcggtagccatgctcagcgtctcgttggttgcggtcatcggtatacgtcccccggttcggcttgtttcggctcacggtccagtgccgaacatatcttactcgactgggtgaacgctggaaatgctctgagtcgactttcttacagaatcaataaaggctcccgctggcgggagctgtctaacggatttgaactggagaatttccctacaaataagtgctcccgctggcgggagctgtccgcgaagcggactgagggtggtcatccgtacatggcgaccaccctcagtctcactccgttcgacagctcccaccagcgggagccagtgaatctaatcagcccttgatcttgcccatgacgaccttggtgacggccttggcgtcggcctgaccgcgcgtggccttcatcacggcaccgatgattacacccatcggcttcatgttgccgctcttgagcttctcgacaacgtccgggttggcttcgaacgccgcgtcgacggccgcctcgatggcaccgttgtcttcgacgatcttgtagtcgtgcttcttgacgacttcatccggagtgccttcgcccttaagcacgccttcgacggtctgcttggcgagcttgtcgttgagcttgccggaggcgatgagcttctcgacctcggccacatcggccggggtgatcggcagctcttcgagggacacacccttggcgttggcttcgcgggaaagctcgcccagccaccacttgcgggcaccggcagccttggcaccggccttgacggtttcctcaatcaggtcgagggcgtcggcgttgaggatgtcgcgcatctgcagatcactcaggccccactcggacttgaggcggttgcggcgctcgcgcggcatttccggcatctgggccttcatctcctcgatgtgctccttggtgatgtggagcatgacgaggtcggggtccgggaagtagcggtagtcgtcggcatcggacttcagacggccgccagcggtggtctgcgtagcctcatcccagtggcgggtctcctgcagaatctccttgccgtcgtccagacgagcggcctgacggcgaatctcgtactggatggtcttctcgatgccgcggaacgagttcacattcttggtctcggaacgggtgccgtacggagcgtccgggctcgggcgcaacgagacgttcacgtcagcgcgcatgttgccctgctccatacgagcgtgggagatgttcaacgcgcgcacgatgtcgcggatggcgcgcacataggcaccggcgatttcgggagcgcggtcgcccgccccctcgatcggcttggtgacgatctcaatcagcggcacaccggcacggttgtagtcgaccagcgagtggtcggcaccttcgatacggccgtcggcgccacccacgtgggtgttcttgccggcgtcgtcctcgatgtgcgcgcgctcgatcggcacgcggaacacggtgccgtcttccagctcgacgtccaggtagccgttgccgttggtgggcttgtcgtactgcgagatctggtagtcgcgcggcatgtccgggtagaagtagttcttacgggcgaactggctccactcggcgatttcgcagtgcagggccagacccagcttgatggcgtaatcgacggcggtcttgttgatcaccggcagagagcccggcaggccaaggctcaccggggtcagctcggtgttcggctcgccaccgaactcgatgtgggccgggcagaacagcttggtgttcgtggacagctccacgtgggtttccagaccgaagaccacatcgtacttcttggtggcatcggcgtacttcatcagtttttcagccatgatgttgtttctttccttccgatgctcacttgcccagaccgtcaagccacggggtcttgaggtcgttccagatcgggccgttccagctgtcttccagcgcggcttcgagggccgcggccggcttgtacatgacttcgtcgcgctgctgcggggcgatgaactggaagccgacgggcaggccgtcgtcggacaggccggccgggatggacatggcaggcacgccggcgaggttggccggaatggtggcgatgtcgttcatgtacatggccagcgggtcgtccatcttctcgccgaacttgaaggcggtggacgggctggtgggggccacgagcacgtcgacctgttcgaaggccttcttgaagtcttcgataatcagcgtgcggaccttctgggccgagccgtaccaggcgtcgtagtagccggcggacagggcgtaggtgccgaggatgatacggcgcttgacctcgtcgccgaagccggcttcacgggtgtaggccatcatgttggcggcggtctgcggcacgccggtcggcggcatcacgcgcaggccgtagcgcatgccatcgtaacgggccaggttggagctgacctcggacggcatgatgatgtagtaagcgcctagcgagtagccgatgtgcgggaccgagacctcaacgacctcggcacccatctccttgagcttgtcgacggcctcgttgaagcgggcctcgacgccgggctggaagccgtcgccgccgagttccttgatgaggccgaccttcatacccttcagatcgcgcttggcgccttcgcgggcggcggcgaccatcgggcgcgggccttcggggatggaggtggagtcacgcttgtcgtggccaccgatgatctcctgcagcagtgcggagtcgagcacggtgcgggagaccgggccgatctggtcgagcgaggaggccatggcgatggctccgaaacgggagacgccgccgtaggtgggtttgacgcccacggtgccggtcagggcgccgggctggcgaatcgagccaccagtgtcggtgccgagggcgatcggtgcctcgaatgcggcgactgcggaggcggagccaccaccggaaccgccgggcacgcgctcggtatcccacgggttgtgggtggtctggtaggcggagtgctcggtggaggagccctgggcgaattcgtcgaggttggtcttgccgagaatcggcatgccggcggccttgagcttttcgatgacggtggcgtcgtacggcggcacccagccttcgaggatcttggaggcggcggtggtttcgatgcccttggtgacgatcatgtccttgatggcgatcggcacaccagccagctcaggcagggcggccttgtcttcggcggacttggcgtcgaaggcgtcggcctgctcgagagccacatcgccggaaaccttcaggaaggccttgatggacggctcggcagcctcgatcaccttgaggtgggcttcgacgagctcgcgagaggtgacgtcgcccttcttgacggcagcggcctgctcggcagcagacagtttgacgagagttgcggtttcgttgctcatcgattactcctcgcttcccaggattcgcggtgccacgaacatgccggcctcggtcttcgggccaccggcgagcgcctcttcctgcgtgagcggggtttcggcgacgtccgggcgcaggtaggcttccagcggaaccgggttggcggtcggcggcacatcgtcggaggcgacttcctggaccttgttgatggagtctgcgatgacgttcagttcgccctgcagacgggtgatttcctcatcggtgagcgcgattcgggccagatcgcccaaatgcacgatttcttcgcgtgaaaatgttggcatggccataactatatgagccgtatgtgacacgcagttgtcgggaaaccgcattttcctaccctttgagaccatttcagcagggcaggcactcgggtcattatttgatatccgcttttctggtgacgatgagaccgccgatccatgcggcaggattgtcggcgcatggctacacgcctgatacggcgtgttgggcaatccatgcgtgcatggccacggccgccgcagcgcctgcattaatggagcgcacggaaccgaattgagagatgtagaccacatcgtcggccaattcgagggccttctcgctcaatccggggccttccgcaccgaagagcagcaggcaccgcttggggaaggtataggtttccatcggcactgcgccgggaatgatatcgagggcgatgacgcgggcggcttgaagctccttgatgcgcgcatcacaagcatcgatttcggccagcagctcatgaaggtgcttgttgtctccatccacagccacatcatgcgcacggatggcggcgacaccggccttggctcgttcataggcgatttcaccggcgatgcgatgatgccagctttccaccagttcggcgatggaggggtggtgttcgacgtgctggtacagttcggtcatcaacgcgcccttgcgattccacttatgtggaccgacaatgtgtacgcgcttggcctggaaggcgttggcggtgcggaccatggaaccgatgttgaaatcgtgggtccagttttccaccgcaacttcgaagtcatgacgccctcgagcgtcaagatcggccttaatggcagcgacggtccagtagcggtaacgatccaatacgttgcggcggtcgccgtcattcaacagcaccgagtcgaaacgaccgtcataattcggagaagtcggatcgtcgggacgaggctcgccgggatgggtctcagaccacggcccaaggccgatttcacggaattccggttcacctgaagctttggcagccaaagaaatctggttgggtgcgtgcaatctttctcctcgataacgctattcaccggttcctcttagtcaacttcgcggctcagcccggttgactttatgcgagggaagtcaaaggtggatttaccgcagttcggattcgtcgaagacctggatgaaggggagcgtttgctcgtcgccggtggaggggttgaccacattgatgtctttggcaccgccaccgaccagcgaggcgatggccacgaccttggcacccagctgctccactatgccaaagtcgaggctcagctcattgccgttgcgcagggtgaccagcgagctggtctgcacgtacgacttttcggacagccaagcatccaacagcaccacacggcggccttcgatggaggggcccttgatggacgggtagacgaagtccatcacgaatccgtctaggtcctcgccacgagaggcggcggcctggatcatggcggacaccatgggcacagatgctgcggtcaaggcaccaacagcatcgaagtcatcaaccgaatagcccgcatcttccaaagcgtcaatcagtacatggcccatgacggtggcggcacggtggtcaaaagtcaccgcggcaagttcggagaacggacggcccaccacatgctccctcagcaaggtggctagctgttcacgcggctccagcatggcaaagtcattgcggctcttcgcgacggcgaggtccggggtaccagtggggcggaatccagattcagtcatgactccagactatcgcctgaggcagtcagatgagtatcaccttcatcggccggcaccacttcaggggcggacagttcgctcacattgcctttatctgattcgatgatcggtacttcctcgatgatcttggtcggttcgattttttgcagcttgcgagcggtgggcaacacacggcgttccaaactggacgcgaacttgttgtaggcgctgaccgtcttagtaatctgggtgcccaatttgatggcataatcacccagcgtggagaaccgttcgtacagttctcgggacaaatcgaacagctgcttggcgtcatcggtgagcgactgctgctgccaggcataggccacggatttcagcacggcccagagcgtgaccggcgaggtgagcgccactttgcgagagaacgcatcatccatcagtgtgggatcggcttcgagcgcggcctgcagtagtgcctcattggggatgaaggccaccacaaaatcaggtgctacatcaaaggcattccaataggccttttcgccgagagcacgtacatgctcgcgcaacgccttggcatgggaccgcagcaaatcatcgcggcgggcaatatcctcggggctggcggtgtccgggatttcgcaggcacgctggtaatcggcataaggcactttggcatcaatcggaatggtcttgcctcccggcagatgcacgatcatatccgggcgcaacgtacgcccatcggcatccgtgaccaccacctgggtgtcgaaatcgacatgttccagcaatccggcggactcgacaatgttcttgagctgggcctcgccccacgcgccacgcaccttgttgttgcgcaacgcggcggacaaggaactggtttccttgtccaaacgggcctgctgatcgttgagccccttgagttgggctcccaatgcgcccatttccctcttgcggccctcttcgatctgcgtgaccttgttctgcaaggtatcaagattcttggccactggcgcaagcgcctcgagcaccttgctctgttctttcaaacgtgcttcctgttcagcacgcttggcctcggcggcctgagcatccgcctgacgcttccgttctgcctccgcagctgcacgctcacgttcctgctgaatgcgaatctgctcagcctgctgcgcctgggcaagttgtgacttggcgaaagccaattgctggttcacgccttcaatctgagcctgtgcggcagcattgcgagcactgagctcagcgttctcgaatcgcgcattctccagcgaggtcttggcctcttccagctcctcgcttttgacgcctcgagccatctcctgacccttatgacggcctagcacgaagccggcgaagaggccaagccctgcaccaaccactagcacgacgatgacgataatcacggttcctatttgctcaaacatggtacccagtatgtcatcgatggtgaatgacggtaaaactcgtcacgatttgacgagacgcgcaatggccgcggaagcctccgcaagtttttcatcggccacctcgccgccctgaatcgacgcctgccgcacgcaatggttgagatgatcgtccagcagcaataacgccacggatttcagcgccgaattcgacgccgaaatctgcgtcaggatatcgatgcagtatttgtcatcctccaccatctgcgtgatggcacgcacctgtccttcgatacggcgcaatcgtgcgatgaccttggccttgtcttcgtcataaccatgcatcgcaaaccccctgatacttatccgtcagctgaacacaccccattatataccctctaggggtatagggtatacactgttgttcagtacaacaaacaaggggaaggaacggttatggagctcagcatcttctcggccgccacggcgctgatagcggcggccgcattgacatggctggtactgcggttcttcttcggaacgcagaaagccacggccggggccatggacgcctccggcgaacgccaatccgcaacaatcaccgtcaagggcgggtactcccccgccgtgatcagcatgcgcacgggtacgccgatcacgctgactttcgatcgacaggagaccggcgaatgcacttcgcatgtggtgttcgcggatctggggcttgacgccatgctgccgggcaacgccaccaccgacgtggaactaccggcgttgccggcgggcgaatatccgtttgcatgcggcatgaatatggtgcatgggttgttgagggttgagggagaggagagtaaggacggtgcggataaggacgggcttcgcccgcgtgctgacggctcggccgaagccgagggggtctctccctcagacttgcgggttggagctccggttgtggatgcggcggaggccgagcggcgagaggcggctgaacgcgccaatgagatcaaggcgctgacgaagctggtgattgtgggcgcggtactgacgttgccggtattcgccgtcaccatgctgcatatggccaatcccgcgctggtgccgcattggatggtgaacccgtggctgcaggccattctcatcacgccggtgatgttctactgcgggcgtccgatccacacggtcggcttccccgcgctggcgcaccgctcccccgacatgaactcgctggtctcgctgggcacttcggccgcctacctgtattcgctggtgacctgcatcgccccgtgggtgttcccggagagctcgcgcgaaccgtatttcgaatcggtcggcgtggtcatcactttggtgctggtcggccgcctgctggaaaccaaggcccgtgaaggcaccggcaaggcggtgcagtcgcttatcaaactgcgcccgcgcaccgcgcacaagctcaacgccacttccgcagacaatgtggacggcatcgaatggcgtaatccggcgcatttcacggacaccgacatcgacgccatcgtcaccggcgacctgctggtcgtcaagaacggcgagcgcgtgcccacggacggcgtgatcgtggccggcgaggcgcgtatcgacgaatcgatgatcaccggcgaatccaagccggtctccaaaaccgcaggcgacccggtgaccggggccaccgtgctgctcaagggcgactgcgtgatgcgcgccacccaagtcggcgcggacacggtactctcgcagatcgcggcgatggtggcccgcgcccaggcgaccaaggcgccggtgcagcaactggccgataagatcgcccggtatttcgtgccggcggtgatgatcatcgccatctggacgttcgccatctgggtgtcactgggcccggcgccgcaactggcgcacgcgctggtcactgcggtcagtgtgctgatcatcgcctgcccgtgcgcgctgggactggccacgccgctgtcggtgacggtctcgctgggcttgggcgccaccaacggcgtgctggtcaccagtgccaaggcgctggaacaggcgcgtcgtatcggcactgtggtgttcgacaagaccggcaccatcacgcgcggcgtggtggacgcggccgccgactgggacaagccgagctacgagcaggacacagtcaaggaaggctcgcgcgaggccatcgcggcgttgcgcgaacgcggcatccgcacggtgatgctgtcgggcgacaaggccgaggtagccgggcgcatcgcccgcgaagtcggcatcgatacggtgatctgtgagatcaagccggacggcaaggcctactggatcgccaaactgcagcgcgaacgcgacgaggccgccgtcaagtccgcggacggcacctcccgcacggccgcgcaatcccgcactctgattgcgatggtgggcgacggcatcaacgacgcccccgcactggcccaggcggatctcggcatcgccatcggcaccggcacggacgtggcgatgcagtcggcggacgtgaccttgatgagcggcgatttgcgcggcgtcatcaagaccatcaacctgtccaacgccacgatgcgcaacattcgggagaatctgggctgggcgttcggttacaacgtcatcggcattccggtggccgccggcgtgctctacccgttcaccggctggctgttgagcccgatgatcgcgggtctggcgatggcgttgagctcagtgtgcctggtgctgaacgcgaacaggctgcatgggtcgaacatcaacgcgggcgttgtcgatggcaccgctggcttgggcagcagcacggcggatgtcgaatcagccggatcggccgaatcagccaacgccgccaacatcaccggctccgccacatccaacgcgcctcacgagccaaccgtcatcatcgacgatcgcaccacgctgaatcacaccaatcacgcatctgaccaatccaataatccaaccaacaaggagaacactatggatatgggaatgcacatgcaccacaccgcccccgcggacggcgaaaccgccaccgacccggtgtgcggcatgaccgtggcggtgaacgccgacgcgatcacgcgcgagtatgagggcaagtcctattacttctgcggcgaacactgtgccacgaacttcatgaaggccccgcaggtgttcctggagcagtagtctctgcgtttacctgattcaacgacaatggcctccgcccaaaacgagcggaggccatttgcatatatgaatcaatcaacgaatcagctggcgaagaagaacacgaacagccaagcgccgatgatggcgccgacgatcggggccacgaccgggatccaggcctcgccccagcgggaggagcccttgtgcgggatcggcagaatggcgtgcagcagacgcggcatgaggtcgcgagccgggttcaggccagggccggtcgggccacccatggaggtcacgaggccccacacaatgaagccgacgacgatggaggcggcggcgtaatcctgcttgccccaagccagggacaggcagcacagggcgccgaagacgagcaccagggtgccgaacatctcgttgaggaagtagttgaccttctggttgtccgcgtcagtggtgcagaaggtgccgagaatggcgtcggcgtcctcggtctccttgtagtgcgggtagtaggtcaggtagacgatgaactggccgagcagggcgccgagcagctgggcgacgatgtacggcagcacgtcgctccacgggaacaggccgttgacggcctgggcgatggtcatggccgggttgatgtgcgcgccggagacgctaccgaacataagcaccgggaacatgacgccgaagccgtagcccatggcgatgttcaaccagccggcgtggtgacccttggtgttcttgagctcgacgttggccacggagccgttgccgaagatcatcagaatggcggtgccgaagaactcggcggccagcttggtaaagagagagtattccactgcttcttcttttctcttcgccgcgcaacaggcatggctgactgttcacggcattctgtgtgattggaaatccgttcgcggagccggcgacgcgatttacgctgggcgcgaaagcaaacgtggcgattgtacactttgccccacgacgaaatgctggcaggatgcgatgtcgaatgtccagccgaatgcaatgcccaaaaaagccaccggaatcagccgaagcgaccttgactctcagtggttgcgaatgacgttgcgcaggggtaggacgctggtgggcgagacggacagttcgtcgattcctaggcacaggaacgtatcggtcaggctcaggtctgcgccaagctcgccgcagatgccgcaccggatgccatgacgatgggcagcctcgatagtcatctggatcatgcgcagcacagctggtgaatgcgggccggcaaagcgttcgagactcggggtctgacggtcacaggccagcgtgtactgggtcaggtcgttggtgccgatggagaagaaatcgacttcggcggccagctcgtcggccatgatgaccgacgcaggcgtctcgatcatgacgccgatctggatactctcgttgaagtcggtgtgctcgccgcgcagctcgcttttggcttcttcaagaatccgcttggcgtcgcgcacctcctgcaccgaggtgatcatgggcagcataatggcgatattgccgtatgctgaggcgcgcaacaatgcgcgtaactggactttgaaaatctccgggcgggtcaggcagatgcggattgcccggtaaccaagcgcggggttatcctcgtggtccagattgaagtagtcgacctgtttgtccgcgccgatgtcgagtgtgcggatgatgaccggacggtcgcccatctcctgtgcgacttgtctgtatgcatcgaactgaaattcctcggtcggccagtcctcgcgttccagatacaggaactcactgcggaacaagccgatgccctcagcatcgttggccagcacggcggctacgtcagagggacggctgatgttggcgtacaggtggacccgctgaccggacttggtttcggtgggcttgcctttgagcttccgtagtaggctcaggtgttcctcagcttcggccttcctgcgctggcactcggtcagcgtggcctcgtccgggtcgacgaacaccgcaccgctggcgccgtcgattacggcaaagtgaccgtcatcagtcgggtcgaaggcgtcgccgataccggtgatggcgggcaggcccatcgtgcgcgccagaatcgcggtgtgcgagttcgctgagcccttggcggtcacgaggcccaaaaccttagcgcggtcgagctgcgcggtctcgctgggagcaagatcttgggcgaagatgatgtggctttcgccgttctgcgcaatcccgttctgcacagtaccgttctgcacagcatcgccttgtatactgccatcctgcgccgtgctatcgcgtttgccttgcagcacgttcatcacgcggcgagaaacatcctcgacatcagcggctcgagcctgcatggtcgagctatccatcgcagcgaacatggcggcgaactgttcggcgacgctcttcaccgcgaattcggcgttcaccttgtcttgcgcaatcaaaccttcgacgcattccgcatagtccgggtcctggagcataagccgatgagcgtcgaacagttcggccttgttttcgccgaactcagcggcgacgttgtcacgcagttgcttgagctgagcgacggccgtgtcacgggccgcgcggaatcgatccatctcggcctgcgggtcgtcgattacgcggcgttctacggcataatctacggcggcgagcacgcggaccgtgccgatagcaatgccagcggatacgccgacgccctgtatcgttctcattacaggtgctccttgaggaatcgctcgaactctgcggcagcgacagcttcatcgttgccctgcacccgaaccgtaacctcgtcaccttgttgaacatcaagtcccataacaccgaagatacgcttggcatccacggatcttccaccgtaggcaacggtgatgctcgattcatattcctgcgctttggcaaccaaccggccagccgggcgggcgtgcatgccttcggggtcggatacggtgaacgtgaatatctgaggcatgacgttgctccttacacgtccggccgtcacgcgcgaagacggcctttccgcaccagctacggactgatgctggaaaaaacaaaaaaccggaatctttcgattccggttgtctgtgcccccgcagggattcgaaccctggacacgctgattaagagtcagctgctctaaccaactgagctacaggggcttggttagatgttgaagtgttccttgcaacaggtagtaaatatactcagatttgaagcgaatgcaactctcggcgtgtcgcgcctatttccggcgtttttgctaatacaaaaatccccatgcggcgcgaaccgcacgggggatgatgcttaagctcagactcttggtctgtgtgattccagcactaggccggaatgactcactcggccacgaccttcacgaagaaggaagcggtgatctccgggtggagggccaccttggcggggaaatcgccggtggtcttgatggtctcgacctcgatggccttcgggttcaccgcggccttgtcggacagagcgacggcgatggcctcgttggagataccaccgaacagcttgccggactcggacaccttggcggcgatctcgacggtagtgccctcgatggcggccttagcggcgacggcgtcctcgcgggtagcgacggccttggccagacgagcgcgcttcatagcgacgatctgagcctcagcgcccttggtccacgcgaaagcgaggccctgcgggaacaggtagttgcgggcgtagccggacttcacgtcgacaacgtcaccggaatggcccaggttggacacggtcttggtgagaataaccttggtttcagccattgttcaaagcctccctaactcagcgacccgaggtggcgtacggcagcagggccatctcgcgggcgttcttaatcgccttggacagctcacgctgctcctgcacggtcacgccggtgatacgacgggaacggatcttgccgcgatcggaaatgaacttacgcagcagcgcaacgtccttgtaatcgatctcggtgaccttggcggccttcagcgggttcggcttcttcttgaacggcttgaccggcggttgcggcctcttacgtgacatgatgttctccttataaatcttgatattgattgctgctggcagcggggaggcaagtactgatcagaactccgggtcggaatcgtcgccgccgaaatcggaggaagcgccgaacgtggagaagctaccggcatcagatgcaccggcattactccacgggtcgaccgcaggagcggacgggttggcgggagcggcagactgctgggagtatccagcgccaccaccctgatagccaccgttgtaaccgccctggccaccggcataaccaccttggccaccctggttgccatagccctgattgggctgctgaccaccctggaaaccaccggaacgaccctggaagccgccctgaccggacgactggcgagtcacctgtgcggtggcgtagcgcagggagggcccgatttcatcgagctgcatctccacgacggttcgctgggaaccatcctgtgcctgataggaacgctgctggaggcgaccggtggcaatcacgcgcatgcccttcttcagggactgggcgcagtggtcggccagatcacgccaagcggagcacctcatgaacagcgcctgaccatcctcgaactggttggtctgacgattccaggttcgcggggtggaagcaatcgtgaagctcgccacggtcgcaccgctgccaatagtgcgcagctcggggtccgcagtgaggttgcccacgatggtgatgacggtttcgcctgccataacggtccttcttacttaccttgaataccagctgttcagctgactaaacgcttgattcagcccttacgaagaatcttcgtacgaatcacggattcgttgaggttcagaacacggtcaagctcatcgctggtagcgggctcggcggtgtacttcaccacgacgtagttgccttcggtcttaccggcaatctcataggcgagcttgcgacggccccagtaatcgggctcatcgaaagagccgccttccttggtgacgagttccagatactgctcggtcagcttcttcagaccgcgctcatccagctcaggatcggcgatgaacatcagttcgtacttgtgcgcagacatcacccacctccttcggactattcggccacggacgttccgtggcaggagtgtgtatgcgtgttagcccatgacgcagcaccaaaccggcaccgcctcttcgggcaacttggacagtctatatatgaggcgggacagggtatgcccatattcttgccggtttcgcgatgtccaccgttttggccaagcccacgcagcccgcggctcccatcactcccggagcggcaccggtagccgcacctggcgcgacctccaccaccatgaatgagcagcagaagaaaatcttcatcatcgttggtgccgtggccggcttcctcgtgctgttcggtatcgtgtatggcgtgctgtcttccgccgtgttcagcgcgaagagcgttgcgaacagctatgtggccgccatctcctccggcaactacgacaaggccaacaccatcgccgatcctcacgtggatacgaaccagcgcgcactgctgaccagcaaggcatcctcgggcgagaacacgcgcattaccaacgcgcgcatctcgcagaactccaataatgccgatggcaccgtgagcgcccagctaacgtacacgcttgaaggcaaggaggtcaacggcaacttcaccatcaaagacaataaggtcagtgtcgagttctccgagtgatttcggcaatctcaacactcttacgaaataagcaccccgccgtggcgttcgctgcggcggggtgcttgtacactggttaaggcgtaaatcacacagcgactcaaacaaaggatgcgaacgcatgtcggcgattcttgaaggcactccggataaacgactcgtattggtcacgggccgcgcctaccccgagctagctgagaaggtggccgaatgcttgggaaccgaaatcctcgaaaccacgtcctatgactttgccaatggcgagatgtacgtgcgtttcaccgaaccggtgcgcggtgcggacgtgttcgtgctgcagtgtcattcgggcgatatcaacaagtggatcatggaacagctcatcatgatcgatgctttgaagcgcgcctccgccaagtcgattaccgtggtggcgcccttcctcggctactcgcgccaggataagaagcaccgcggtcgtgagcccatcaccgcccgtctgattttcgatctgttccacgccgccggtgcagaccgcattatgacggtcgatctgcacgccgctcaggagcagggtttcttcgatggtccggtcgatcatctaaccgccatgccggtgctgctcgattacgtgcgttccacccttgatctgggcaacaccaccatcgtgtccccggatgccggccgtatcaaagtgtccgaacagtgggccgccaagctaggcaatctgccgctggcattcatccacaaacagcgtgatattactcgtccgaaccatgccgaggcacatggcattatcggcgatgtcgacggccgcgactgcgtggtcatcgacgacatggtcgataccgccggtactatctgcgaagccgtgcgcaccctgaacgaatccggcgccaagtcggtgacgctggtcgccacccatggcctgctctccggcccggccgtggagcgcctgtctcactgcggcgcgcatgaaatcgtgtttatggacaccgtgccgattcccgaagagaagcgcctgccgaatatgaccgtactgtcttgcgcaccgctgctggccgcgggtattcgctccgtgttcgaggaaggttccgtggcgattctgctcgacggcctgcccgaggacatgcgtccgcgcaatatctatgcgtgattgatacgccgaaaatccttacgaaaaaaacgccgcttggctatcaagtggcgtttttttcgtatagctccaatcagatgaaggcgcgttcgccgaagatggcggtgccgacgcgcacgatggtggagccttcttcgatggcgtaggtcatgtcgtgggtcatgcccatggacagttcggtgcagtcggccgtgccttcggcaccggaggcaagaatctggtcacgagtgcggcgcagatgcgcgaagcccgcacgaatcgtgcgctcatcatccacatgggcaccaatagtcatcaatccctgcaagcgcagtccgcccatcgcaccgatgcgctgggccaagtcgatggcgtggctgggtgcgcagccggacttcgattcctcgccggattcgttcacctccagcaacacgccgaccgtgatgccgcgcatggtggcacggcgggcgatcttttccgccagttcgatggaatccacggattcgatggtgtccactaccggcagcaccttgccgattttattggcttgcaattggccgatgagatggaaaggaatatgcgttgcagctgcggcattggccgtgtcagcctcagcggcatcaatcacgcctagcgaataaccacgctcccccagtcgttttgccagaccgtcagccttgacagtaatctcctgtggacgattctcaccaatcacgcgaataccagcatcgatagccgccagaatctcgccgacatcgcgcgtcttggtggcagccagcaattggaccgaaccggcagcacgcccggctgcggactccgctgaggcaatccggtcaagcacgcgatgcacaccatcagtaatctcttgtgcgcgcgcctgatcgataacttcgttggcgagatccttatggtccatgtatgccgtcattgctgcccctgttcgtagattccccaccatcgtagtctcatacgcgcacataatgcttgttattgaacaaaagtgaagcccccgctgttcatgcgcgggggcttggtgatgctaggccgagcgagtgggactagcaggtaccggacttgcggcgcttgaggatgattacacccgcaacagcaagtaccacggcgaggatgccaacaccaagcacggctgcaccggtgtcaggtatcttcttgtgcttgccggagtctgcatcacccttgttctggttggaatcgttgccttggttgggcttgtccgtgccggaaccgggcttatcgccaccctggccaggcttcgtggtgctcttctcaaccagacccgcgatggcatcgctgattgcctcagtcgcagcctgtacgtcagactgggcggcctgaccatcactcgtcagcgcattcgccgtagcgactgccgaatcaagcacggccagcgattcatcagtccactttgtgcgatccacggcagcagcggcatcgagctgagcgctcagcgcggcacgatcttgcaccgtagctacaagcaccagcttcttcgctgcctgcttcagctgggttgcggcatccaccaccgcagcttcggtggcatcctcagccttatacacctgctgcgccgaatccaataccgccgcgtactccgcccatgaagtctcggtgtacttggaggcatcgtcagccttaggcgagtcagcgagcgcctgcttgagctcggtcttgtcgatcggtgtgggctcaggcggctcaggcgtactgtcgtcaatggcatgaacctgccattcggcaacagccggagaagccgagccggacgtgataaccatacgcaacttggtagtcttgaccggagtgttccacgtgccatcagaccaccccttggcatcgccggtggcccagccagcagacggtgaattggcggtcacagtgtaggtggcgtcggaaatatccacgaagttgccggcaccgttgttcgccaaggcgtcccagtactgcaattcccacgatgccggaatacccaatccgccatcatccgaggtgaattgcacgcggctagagtcgatagtcacttcacggtcccactcgtagtcgaggcgcatctcaccggtgttgggccaagtgccccagacatcctcgttggcaatggtgatatcgggaatgatcttgccgtcgttcaacgcggcggcacccttgacccagccggatgccttgccgtccacatcggtggcggtggcatcgccctcaatgtagccggtcagcggcacggaagtgtcggatggaatgtcggttttcgccgaagcggacacgttgccggccttatcggtggcgcggtagtacacggtggcgcgcgacgcgctcggtgcagcaatcggcttgctgtacgtggcccattgaccgtctgtgccaatgcggtattcaattgatgcgacaccggaaccggtgccgtcatcagcggtcaaggtcagcgtgcgctcctccttatcggcggcggcggtcacggttggcgcggcggagtccaccttgccgccggccttggccacgtcggaaacgttgccggcctgatcggtggcgcgagcccacacttcgacatcgccctgctgggaaagcgtggcaatggccgcgtttgcattcgcggcgatggtggtccagctcttgccttgatcagcggaaatctccagcttggcgataggtgcggtgtcgtccgtggcctgcacggtggcgaacggagcggtggtgagccactcgctattgcctgcgttagcagtaacggcaacggttacagtcggcttcgtggtatcagcggcaggctggtagccgtcctgcacggtgacatttaccgacacattgccctgctcgcttgcctcaccgggcacgccggcgaccacgccgtaggccgtaaacgaaccgaccttggcatacgaggaagcatcaactggacgccaaattactggggaggcaacggttgggttcccgtacttcacatccactgtggccggcagagtaggcgcagtaccggtggcggtggtcacgctcttcggcgcagtgattgccggcgattcgctggagtcggagccgacttcccattcagcaacggccacggaggcatagccgccatccacagcttgaccggtcatgtcgagctttaaggcagtagtggtcaccgcatcgaaggtgacggcgttggggttggccttgcctgtggtcgttgtataggcactcgggttggtgacatccttccatgtgccgtccgcgtccaagtactgaatcttccacgaggcgggcgcgcgcagagcgttggaatccacgtcgaaccaaaccttagacgagttgacgcgcacagtgccatcccattggtagaccagagaatcgccggactgcgattgcgggatagaacggtagttggtccagtgattcggcgggaccacagcggtttgcaacacacggccgtcgttcaccgaacccttccaagcaggcgtttcagtgaacgtggcgctcacctttgcgtacggagccacgttggtggagggctgcgttttctcggccttggttggatgggcggtggaaaccatctggccgtcggcggtccaatcgacttcatcaatgcacacggcacggcggaaatcggtgccgccttccttgtcgccggtgtgataggtcacataccatttgtcgccgaactggagcaccgagggggtgcatcgtggtggccgagccagaaggcacgattacgccttggtacttccatgggccgagcgggctgtcggaagtggagtactggatgcaagcttgatagttcgattccacgcaggtggccgtgcccgaaccgggcttaccgccgtcgtacacgttgtaataggtatcgcccttacggaacacccacgccgcctcgaagaatcccttcgggccgttcgcgttgctgtccgcgtccttcatggtgtggaggttcggcgtggtgccatcagccttggtttccacctcggtgtatgaggtgcggccggttgtggcgtccttcttcatcttgatggcgagctgagtgccgaacgtaccaaagtgcaaatatccggtgccatcctcgtccacaaagaatgccggatcgatggtttcaatctgggtttgcgatgtggtgagcagcggcttgccgatggcatccttccacgggccgagcggactcttcgacttggccacgccgatggcgaacgggtcctgtccagccgcctcagaagccttgtccttcaccggcacgtagtagtagaaccaatcatcggaagtgtcgctcggggtgccgttatcgtcggctacgacttggccggcgtacgcgccatcgccggtggcccagctgaacaggtctgccttggcgatggtcttgtaatgtgtccatttgccttgattcaggccgtcttcatcggtgacgtatacgccccagtccttcatgttgaaggagccgtagtcgggcgaagcctcatcgtgaccggtgaagacgaagagtttgccgtcatagctcagcgcggatgcatctgcagagtagtagttctgcgaaagatcgttcggggtgtcaataccctcgttctgcccgatggggttgcgcatgtagctgggcagtgcgctattgtcgatttgggtgacggtgacatcaggattgttatacggcagttcgttatacgcgtgaccggcaacgctgggcgcgttgtcagcggtggctgaatcggcggccattgcggtcggcgcaagggcaaggcctgacagcaatgtcgctgcggcgacgagtccaccggccaccgcgcgaaccgattgcgcggatacatggaaactcatagtgctcctcattgagtgagtgaaaagagtaatgatgggtagaaggaaaaggctagagccccctctgtgagggggctcactcggcagaatgactccgttgcgggtcaggccgagtggcgagccgaaccgtggtcgccggactggcgacgcttcaggatggtcacgcctgcggcggtgagcagcacggcagccgcagcaactacggaaaccgcggcaccagtcggaggcacacgatcacccttgttgtccttatcatccttatcagtgtcggtcacaccaggctgctgggagccgggcttctgctcaaccttggtggcccaaaatgccttgtcaagggcatcctgtgcggcatcgacatcggcctgcttggcatccttgtcgtcgtacaccttctgagcggcggcaatctggctctgcagagcctgccatgcctcctcggtgtacttcgacttgtcagccttcttggcctgctcgatggaagccttgagagactccttcttcaccgtttcgacggcgggcttctcttccaaggccttgacggccttgttcagcgaagcggacgcttcctggacggcggcctgagtgacctcaccggactcatcgcccttgagcacaccttccgcagcctcgatggccttgttcaaggcctcgacactcttatccgtgtacttgccggaagcggcctcggccttggccgtgtcgatggccgcctgcaacgtggacttctccacgtcggtggcgagcgcaacgagcaccttctggccgtcctcgagcttggtcacctgctcggcgacctgttcttcggtggcattgacatcgtcgtacacagcctgggcagcgtcaatgctttgctggaactcagcccatgaagcggcggtgtagcggtttgcatcgaggccgttggctgtgtcaagagccgacttgagcgcggtcttgtcgaccggggtaggttcaggctcggtgccgtcaataccatgcacgccccactcggccacggcggccccgaaggtgctgctgccggtgtgcggagtgagcacgagtcgcagcgacttggtggtgaccggcttgaaggtcacagcgctccaacccttggcatcggtatccgcacgagaagccggcgaattacgcacgacggtgtaatcctcggtgggctcgacgtccttccaagaaccatcctcggcgaggtactgaatcttccaagcgtccgggacttccagaccacccttcgaatcgtcagtctcagcgaagttggcccagaactgggcgcggctctggtcaacggtcacggactgaccgaagtcgtactgggcgtacatgccgtcctttgccttgccccaagaaccccagaccttgtcgttgacgttctgatcatccgtggtcggccaagtatcatcgacgactacgccgtcgttgagcttgccttcggccggtgaccaggttgcctcggaatcaggcgaaatggtggtcttggtcgccttgccttcaatccaaccggccaacggctcaggctcaggctcaggagtggaggaaccgttcgggtcggcaaccacgtggacagtgagcttggcagctgcggaagacgaaccgtcgtcgacggtaccagccacctcgtagtcaccaaccttggtcaggtcgatggccttgatgtcggcatccttccacgtgaccttgcggtcgtcgttgtatccgttcgggaacttcaccggaaccgtggcgggcaggtcgatggacttggcgttctggtagacggtctgctcaaccggctgcgcattacccacggtctgcgatgcggtatcggaacgagccgcgatgtgtgcaaccgtaccgttcagcgcaccggcgacggtgcccttgacatcgaatacggcatcggcggccagctgagcgtcggtcaccttaccccacgtgacggcgaggtcacggcgagaaccgtcggtgtatacggcgctcacggtggagggcagcttcagatcatcggccttggaaccggtctgcaccagtcggttgacttcgtccacgctcaccggctcgatggcgtacgcctcgaactcggaagcacccacgatggcgcccttcgggaagaccacgcgcagcttgttggtttcgacggtgtcggcgaacttcacttcgttgccttcgttccggttgaccgtgtaggactggccgtcagccagcttcacatcctgccagttaccgtcagcgtcagcgtactgaagcttccaagatgagaccatcggcacgccaccgccatcggtccagaagaagaccttggccttcttcagcggcaccttgccggcccacttcagttgcagccacggctccacaccggtgttgtcgccccagttgttccaggtctcgttcggcgtgttggcgtataccacctgaccgtcgatgaccttcttggcgttgtccttcggctggtagccgttggtgtagctggcagaggcgctcgactgcggggctacgttcacggtaccgtcagaggggatgccgtgaacggtgatttccttggagccttccttctcgccatcggaagcggtgagcttcaggacgtagtcaccctccttgttgaaggtgacggtggtgctggcagcggaggcgtccacgaacttcgcagcaccgccttccggaccggagacctgggaccatgtggtggtgacgtcgccttctgcgggcagaccgtcatccttcaccgtaccgacgagcttggcaccggatgaggtgctggaagacacgtaagcatccacctgcggagtctggttctcagaagtgccgtcagccttgataccggtgttgtaggcttcgatctccttgacaccgacggccatgccggcctgcggcgtgaaggtgacgcggatggtcgtggtctccaccggagtgaactggatacggttgtagttcgcgcccgcgtagttcggggtgcgcacctgatccgcaatcggggcccatgtgccgtcatccttctggtactccaacttgtagttggcgggctcggcatagccggagatggtctggctggacgagctctggtagaagtacaagcggatgtcgtcgatcttctgcttgccgtccttgaacttgatattgagcgtgtcggtcttgttcccggagcccttggtaccccagaacgattccatcacggtcttgccgtccaccgcgttcttggccgggtagttggtgtccttctcggcgtaggtggtaccggtcacgtccgcgtccttggccacgttcgtggtggacttggaggcggagtcgacgttggtgccggacttggcgaacaggtcggtcacgcgctgatcggcattgaaggtaacctgattggcggccttcacgttcttgacggcttcggcgccgacggtaacctgggcaccggaatcgtccttgacctcgaccgttcccgcagccgggtcatagatgaggtgcgccagcttgtcggaggtgaaggcgagcttgccgcccacgtacaggctgtagccagcaggaccaccgtagtggctgccgtccttgtcccatacgatggagacatcctgatcgtggtagcgcaggttgtttaccgtgaagtagttccaaccggggatttcgatcgggtttagctcaatcttgttgtcctcgcgcggcaccataccggctacgtcctcgaccatcgtccagttcgtggtgccgagctgggtgtggtggatccaggagcggtaggtgatcttgccgccgttctgtgcggcgtcaaggttcttgtcgaggttgttgatcacgccgtcaccgttcacatcgccgacgttgttgttgtcctcgttccagaactcgttctgatcagggtggttgttatcgccgccctggtagtgcgcgaacgccacccagtacagcagcttcttgaactgctcattggtgatgtagccattcttggctgcatcgtagttgcgaataccggccgagtagacctgcagcagcggctgcgcattaatgatggagaagttgttggaaccggggaagttcaacgcggccttgtccgcctggttggcggtgaagaacgggaagatcgggaactcgttggaatcctcgaacaggcgcagagccttgttgtaatcttcgttgccggtaggcatcaggccttcggagtacgggtagtagttattgatctccttgtacttggcgaaagcaccgtcgttcagccacctgtgcttgagcaggttgtcggacttgtcccacagttcagtggtgacttctttctggatcttgtcggcgatggcccgcatcttctcggcgttggcggtatcgccagcagccttgtatgcctgagcagccgcgttagcgttggcccacatattggcggaaccatcggcgcgatccatgcgctggccggagcgacccggctcagagaaggaaacggcgtcggcatcgttaccggtcatcgaccaccaggaccagtcaatcaagctgttgtcattgttgttctggttgtcgttgttgtccggctcgctcttggaagcgagtagaccttgcacgtcctcggcaccctggtcggccagcttctcggccacggtggacggaccgccgtgcaccttgtaggagtcccagccggcgcgcgtgatgtactgcgtgtagctatggttccagttggccgggtcgcccggattgtcgtggtagtagtaatagcccgcattgctcttcttggcggtatcgccggcggaaagccaggtgccgtaggagtactcggggttgcggaaccacttggtgtccatcatgaacatgccggaggtgagcacgatctggttgttgtagccgagcacaccctcgatggaggtcgggtactggaaggtgttgccaggcatgttggcgtcgagcatgttgaaacggctcagccaccagcggtagaccacggtcttatcgatgttgtcttccggagtgtccacatagggagcgttatcgacccaccacttgttgtaggtggtcacggaatccttgtaggaggcggcagcatccttaaggtcgccggtgtaacgggcctcatattccttggtggagtcaggcagttcgttggcgatcaggccgagctgaatcttgacggtctgcggttcgttggccttgaggctcaacgtgctggtgagtttgccaccgctgacgatccagttggaaccgtcctggttgttggcggagaagcgcggatagatggtcgtcaggttgttcttgacgttcacgcggccagtaagttcggtggcaccatcagcaccctcggcggcgaacggcgaggccgtggtcagtgtgacatcgcggtcctgcgtgctttccacggtgaggttcgcaaccatcacgttgttgtaggtgatgtacttaacttccttgatcttgaggctcttgccaccggtctggaacagggaggtgaagtagctcggtgtctgcttgcgctgggaggcgtcttcgttaagggtctggtttgcaccgtcagcgtttacggtaacggtaaagccatccctgttggtctcatcccagtaggcggtgttacccacaaaaccgagccgattaggcgtgtgcgtgtacatgtaggcggcgcgaccacgggtgaacaggtagttgttgccgtcggagccttcatacgagtaagcacccttgtcgttcgtgcctttaccagttggctgtgcaccagtacgggtgagaatcttatcgatccagaagtcatggtcggtgtcggtgccggccaggttcttcacgtcgttatcgaatgtctcctgcagatagctggcggcagggttatatgtggtgttgttcgccgccgtcttcatcggatcatcagaccccttgaacgacggatatgccacatccgcattcttgatgacgggcgtatcggctgcctgcgcggtgactgcaccgccggtggccagtgtggcgaccgctgcaaccgcgccgattgacgcaagccaccgctttcgtgttgattgatgcattcctgcttggacctctccgccccggtctttcgcgtcttcgctcaggctacgtcgcgtctatgcgaccaggacttcttctgtggatgctgggccgcagagcccgttctccatcagtttcctttattggttattgggttcaccggaatgagtgtcttcagtaaatctggtgtgatatccgccatggatatcccggttggagcaattcaccgaagctgattccacatcataaccgagcgaatacggtttcacaactttccctcagtgatatcaaccatcttatacaacaaaaacccggtaatttctcagctttcgcatttattttcgcattagggcattgctgtgtttcgccgtgtcgcagtacctacggcgcaacgattcagcctcgctgaatcaggaaccaacaggctcccgctggcgggagctggctcgcaaagcgagactgagggtggcttacacggtaccgcttatgaccgccctcagtcgactccgccgacagctctcacagcgggagcatataattaaaaaataaggcctttcgctgtttggtgtgggtgagtgggtcgggggggtggtggtgctggtcgggtagtttgggggtatggataccacgtcgttgttcaccgccgccctgcaactgcctgacccgtggagggtgtcgggcgtggagttccgtgacgaggaggacggcagacgggaactgcatatcgcgatcgggttcgcggcgggttcgcggttcccctgcccggaaccggggtgcggcgaggccgcgtgtccggtgcatgacgcgagggagcgcgtgtggcggcatctgaacttcttccagtacaaggcgttcattcacgcgggcgtgccgcgcgtgacgtgccccgcccacggcgtgcacgcggtcccggtgccgtgggcgaggccgggaagcgggttcacgctcctgttcgaggcgatggtcgtggagctggccaaaagccagccggtcgcggacatcgccgagcaggtcggcgaacatgacacccgcctgtggcggttcatccgccattacgtggacgaggcgaggctttacgaggactacacgggcgtggaggccataggcatcgacgagaccagccggaagggccaccggtacatcaccgtggtcgccgacctggtggagcgcaacgtaatctgcgtggtcccgggcaaggactcgaccacgatcaaacggttcgcgcgggatttcatggatcacaacggcgatcccgaccgggtgcgtctggttacctgcgacatgagcctggggttcgccaagggcatccgcgagcggctgcccaacgcggcgagaatcatcgacaagttccacgtgatcaaacacgccaacgaggccgtcgacaaggtccgcaaacaggaggcccgcggcaacgcgctgctcaagcggaccaagtacctgtggttgaggaacgaatcgaacctgaccggcctgcaattggaaaccaagcgcagcctgcaacggcgacgattgaaaaccggacgcgcctgtcagatgcgcgagaccctccaggacatctacgacaccagcgccgatcgagccgaggccgagacggccctcaagcgtctgtgctcgtggatgacgcgctcccgactcgaacccatgaaagagttcgcccgccagatacgccgccactggcgggacatcctcgcctacttcgaccacccctacaccaacgcgatcctcgaaggactcaacagcgtcatccagaacgtcaagacccgagcccgcggattcaagaacatgggctacttcagcaccatgatctacctgacctgcggcaaactcgacctcagcaccgtcaccacctgacagacccacccacaccaaacagcgaaaggccaaaaataatctcctgcacgggtattaccccgcacaggagacctcattccccggatgtgttttcggctccaatcgatactgacatccggcctatgccgtcatcgacttattgcagacgatggcggcataagtatttttttgccggccagttgcgcgcaggccggcatatcgccgatatttatcgacgctggaagacacgcatctcgcctatctcgcggttggcccacgagtagtacggcaccaagcgcagcgtcgcgggttcgcccgcacgcggttcgtcggcatccacgtacagcggcgcgtcatcctcgtcggcgtgctcgcgcactgccggcaaatcaacggtatcgacgccacccagcaagtcggcctggaaagccacagcggcatccgcaccggtgacgccatcggccagacgatagttccacagatcaccggggttatcggtctgttcggcgcagtagaccagcggaccgcgcataacggccacctggccggcgtcggagcgcacgcgggagttggcgcgcacgaacttgacggacatgtcgagctcgagcgcaatctccaacgtatcgccggcgttgaccacaaggtatatgaagccgtcttccagcgaacccactgcgggcttgccgttcacggtcagcgtgtaggagcccaaggaccagccggggatgcgcagtccaaatcggaccgagctgtccgcagcgctggcgggcaggctcaccgtgtattccacgtgactgtcccacgggaagtccgaacgctgttcgaccgtaaggccggaagcaaaatcggccttgttggcgatgaactggtggctcagcacggtcttgccgccgtcgcgctcggtgtagatgtaacggtccactgaagcgatgagccgggcgatgttggccgggcagcatgcgcagccgaaccagtcgacacggtgggagagcacgtggtgacgatccgggttgtccagtccgtcgggagtagtctccagtgcgttgacgtagtagtactgcttgccgtcaagcgagatgccggcgatggagccattgaacagttccttctccagcacatcggcgtattcgcccttgggctcgaggtcgagcatctgctgggcgaacatgctcatggccacggaagcgcaggtctcgccgtacatcgtgtcgttcggcaggtcgtaatcgtaggtgaacgattcgcccacatgggtggagccgatcgcaccggtgacatacatgcgacgggtgacgatgttcttccagaaacgcttggcagtgtcgatcagcccctgatcgccgagtagtcggcccacgtgagccacaccggtgcacaggtaaccgacgcgcacggcgtggccgtccgcggtctgctggtcgcgtacgggctcggcagcctggaagtaggtgggcttgtagaagccgagatcatggaagatgttgtcgccgttcatcgccttgagctgcttggcgtagaactgcggatcctgaccgcgcacgtcgatgagatactgggaaagcgtcagataacgcttctcaccggtctcttcatacagcttggcgagggcgagctcgatctcaggatgaccatcggcgccgtggatcttgccttcttcggggccgaagttggcatccaggcagtcggccatctttttggcgacttcaagggcctgctcgttgccggtcacctgatggtaggcgacggcggcctcgatgtagtgacccatcacgtacatctcgtggctctgctgaatcaggctgaagcgcgggcggtcggcccatacgccggacttgatctggtacggggtgtccaaatagccgtccgactgctgggcgcgggcgatgagatcgaccgtgcggtcgcacagcgccttgagctcgggatccgggtggtatgccaatgcgtaggcggcttcctcaagccacttgtagacgtcggagtcttggaagaccatgccatggaactcgtcgtccaattcgccggcggcaaccttcaggttggcaaccgcatggctcttgttgtcagccagctggttgccggctgggtcgtcgggcaccgtggtgtcgatctcgtcgttcatcacgccccactggtaggggatgacggattcgacgatctggtcgcgacgccgcttccagaacggggaagtgattgtaacgttcatgattgtcctttttttaaggcccttgaccacaccgcctccggccctgcaattaaggaccggtttcagccgggctcagtattggcttcgacgctgtcgcgtctcagcacggagcttgctgggagcccaccgggctcccagccaagggccggcggcacgagccgtcagcccttgacagctccggccataaagcccttgacgtagtacttctggagtgcgaggaacaggatggcgcagggaatcagcaggatcacgacgccggcctcggtggcaccgtaatcgatgacgcccatggtctgctgacgcatgttcaccatcgccagcggcagcgtggacttggacgaagagctcaagtacagcggaatcatgaagttgttccatgcctcgaggaaggcgagcaggccaaccgtaaccatcgaaggcttgaccaccggcaccaggatcttgaacaaggcctggaggctgttgcagccgtcgaccatggcggcctcctccatgtccttggggatcgcgtcaaatgcgttacgcatgatgaacgtgctcataggcagctggaacagggtgatgaccaggcccacgcccagcaggctgtcgttcaggccgatctgcttgtaccagaccatcagcgggatcagcagcgaggcgtacggtaccatcaggatcgacagggtgaccatgaagccgaggttgcggcccgggtagtcgaagcgggagaacgagtagccggccagcgtacagacgaccacggagaacacgaccgcgaccagagtcacgattaccgagttgaacaggtacttgggcaggccttcctgataaccgaacagggtcaggtagttggccacgccccagcccttggactgggccgaaccggcctgcgggctgaacgagcagatgatgacccagaccagcgggctgatgaagatgatggccagcagggcctcgaggatccgggcgatgatacgcttccacaatggggtagtcataatgtgttacctcccctttctcacttggtgttgtcgcgcatgccgcgcatctggatggagttgatgatgaccagggccaccagcacgatcagcgagagcgccgcggccatacccagatccttcttggaatcgaaggcgaagttgtagatgagctgcaccacggtcatggtggagttgttcggaccacccttggtcagaatgaagaactgatcgaacgcgaggatcgagccggtcacgcagtagaccaggcacatcacgatggtcggcttcatcaacggcagggtgatcgagcggaagatacgccaggaaccggcgccgtccatgcgggccgcctcgtacagatcaccggggatggcctgcagaccgatcatcatcagcagcatgtagtagcccgagaaacgccaaacaatcacgataatcgtggcccacagggccgactggccggtggccagcaccgaaccaccctcctgcatcaggcccaacgagctcagaatcttggtgacagggcccacctgcggggaatacagggcgtagaacagcagggacgcggacgccaggcccgtcgcggacggcagcaggaagcaggtacgcagcacgttgttccacttcgagctctcctgcacaatcatggccatgcccagaccaaggaccaacaggaagaccgtgacgatcacggtgtactcgagcgtgaaccaaatcgagggccagaacaatttgttctcgaacaccttgacgaagttgtccgggaagttcacgccgcggttgccacccagcaggctccaacgagagcaggccatgacgaccagtagaacaatcggcacgaagaacaggacgataatcatcagccagtccggaagtgcgtacagcagacctcgcctggtctgcgccgccttcgccttggacttatgcacgggcacagccccggcgctcttggaaacactcgacatgtttctctctcctttgggaaattactgtgaaatggtaatcacggaatccgaatgcaatccgatgtcagggcttcgaggaaggaggactccgaagccccgccaacacaccgcattcataaggtatgtagtgatgaaggaagagaaggaatgaagaagaagatagaagttcgattatgtggttgagccggctcctgccctcacaagggagggaccggctcaatctgttcagttattattcagttattgctgtgatttgatgagtgatggtgaggagcatcaccaccgaatcactgggcagacaggacgtcggtgacggccttgttgtcggccttgaggtcaccggaaccccacacggcgttctgcacgagcagctgccacggggagccagcggcgttgaaggcttcgttgaaggccggggacttcggggtctggccgttgccgtcgataatcacggagttgatggtctggatgcgtgggtcagcgtctttgtaagcggtcttcagggtctggatgttggaggcagtgtcgccttggtcagcgaagacttccttctgagcgtcagactgcatcagccagtagaggaagttccaggcctgagcaacgtgcttggagtccttggagatacccatggcatcgccgccgaggaacgtggaggtcttgccttccttggtgcccgggatcggagcaacgccgacctcgaagccgccgtccttctcagcatcgaacagagcagtggtggaggtgttcgggtaaggcataacgccgatcttgccgttcgcgaacggagcggtccaggtggcgccggtctcttccttggagcctgcacccaggccgttggtggtgttggccagctccttgtaagcgtccaagacgcccttcatggagtcgttgtccagggtggcctcggagccatccttgttcatgacggattcgccgtcagcccacacggacgggaagaggtcgaagaccagagcaccaccggactgaccggcgaggtaggagcctgcgacgccatccttgttgagggcggcgaccttcttggcctgctcgacgaactggtcgatgctcttcggaccctgctccgggtccagaccggcttccttgtacaggttcttgttccagaccatcacggaaacgtcagtgatgaacggcagggtgtactcggcgccatcaacagtaccggcttcgatgtggccctgctgcaggtcggccttgttgtccaggccatcgatttgcttggtgatgtcggtgaagatgccctcggaagcccagtacggaatacggaccacgtcgccggcgaggatgtcaggcagggagtcggtctgcgaagcgccgccgaccttgccttccatatcgtcgttcgggatgatctcgagcttgacctggttcttgtggctcttgttgtaagcctcgaccacgttcttggcctgacgctccagaggggaacgggtccacagggtgatctcggtaccatcgtcggtgcccttggccgggataccttcggcggtggcagtgccaccattgccggagccaccacaggcggccagcggaacgatcaacgcggcggcagcgatgccagcaagagtacgggtcagtttattgaaagacaccatgttcgcttctttctctatatatccgctcaactatgagaggcggtggcggacggtccgcctccttggtttcgccctgctcgctcctttgcccggagcaggtaacactgcgaaagccttttctcaatataaacgaacatggaagtttttgcaaaagcgctttcgcgttttcgcgttttttctcacatcaaacgggttcgagactgtgattcgactatgaataacgtgcttgaattggcttaatatcaatgattattccggcgtgtcaagcaaatcaaacaaaagcgaacatggaagtaacgctttctttcacttaccttgcacttgaacaatttccctgactacgccacgccgaaaaaaagatgtttgcgaaagttttcgcattgaagctacaattattcccagatgcaatggcgcgccacaccgtatgaggtatttcatcgcaaaacaatgcgctatatactgctgaagaaccaaggaatcgaggcatgatgacccagccagcaaccggacgggcagcgcgacttgaggatgtggcggcattggccggagtctcgacggccactgcatccaaggcactgcacaacaaaccccgtatcagcgaagaaaccaagcagcgtgtactggatgccgccaagcaactcaactactctcccaacaaactcgcccaatccctagcccgcggcaccaccggcactatcggcctggtcacctccgatctgcagggtcgtttctccacaccgattcttatcggcgcggagaacgagttgcgagcccaatcgacctcagtattgttggccaacgctcgtggcgacgccgccttggaacgtcagcatgtcgagaaactgctgtccctcaaggtcgacggactgctcatcgtgcagtgcgaaaccaaccccaggcccacgcttggccatgactggggcgtgccactggtctacgtctacggcccctccaccgaccccaaagactgctcggtcacttgcgacaacgtggacgccggtcgaatggccatcaaccatctcatctcgtgtggccgccggcacatcgccattatcggcggcgacgaaacctataccgctgccaccgaccgcaccaagggcgcgctcgaggcactggctgagctaggcatcgaaccggccgggccaatccggtacggcaaatgggacgaaggctggggccgcgccgccacccgcctgctgctcgaccaaggggtcaagttcgatgcagtggtctgccaaaacgaccaactggcccgaggctgcattgacgtgctcaagcagcagggactgcgcatcccggatgacgtcgccgtcatcggccacgataactggtcggtactgacctccagctcgaggcccgcactgacgtcgatcgacaacgaaaccgaaaccatcggacggcgtgcggcacgatacttggtcgatgccatcgacggcaacccgcatcacggtgtcgactacgtaccctgccaccttatccagcgcgaatccaccctcccgctggactgatatcaatcgataccctaccgcttcttggttttgcgcccctttaagtagatgtcgatgacgatccatacgccgagggcgaaggccacgacgtagcccatgaagccgatgaccggaatgccgaagataatcggcttcatgccggcgtagtagacaatcgacgagccaacgaacaaaccgaccacaatcagggccatcgtcagacgattcaccatatccgaaagcagctggaacggctcttcggagccgaccagttccatgttgacgcgcaactgaccacgggtcagcatacgggccacggtcttgagttcggtcatggtgccgagcgtggcatgcaaagcctgatgtccctcaacgcccagcgacttgatctcgtctttggtggcgttcttcagcgatttcgacgtggcgatatggtcggaaatgatttcgatcatattcacatcaggaatgaactcgtccagcaagccttcgagcgtaaccaacgcgcggccgacggtggtcaccgtactgggcacctcgatgttgtggcggccggccatctgcgtcagtgcggtcaggaaggcggcaatgtccagttcggccagatccacggtgccgaattccttgacgatcacgtccagatcagccagcagtgctgggtagtcctccggatcggcctcggtgccggcaaatcgcagcagcccctcggccagagcgggcgaatcctgtttggcgacggcgaaaatcatttctttgaggactgcacgggtgcgctggtcgagccgaccggtcataccgaggtcgataagtacgatctggccgccccggatgatgatattgccgggatgtgggtcagcgtggaagaagccgtcgtcgagaatctgcgtggcgtaattgtcgacgagcttggtgccgatctccttcaagtcataaccagcatcgacgagccggcccgggtgggagacggagatgccgtcgatgtactccatgaccaccacatgctcggtgcacagttcggtgtacgccgtcgggcagtccatgtatttgaatcgggcggcgaaacgcttgaattcggcgagattgcgggcctcgatcagaaagtcagtctccgattcgaaggtgtcccacagctcctcgaccacgcccttcaggtccacgatctgtgaggtgcgaatcaccttagtggcggccttggctatggagcgcatgatggagacgtcctgggccatggtttcgcgcacacccgggcgctgcactttaatggccacatcttcgccggttttcagcgtggcgcgatgcacttgcgccagtgaagcagagcccaacggcttggggtcgatatgcgcgaacacctcgtcggcgggacgcccgtattcggcggcaagcacatccaacaccgtggaatacggcatcgggtcggcgtcggcgcgcagtttggcgagttcgtcgcagaagctttgcggcagaatctcggagcgcatcgacagaatctggcccactttgacgaacgtggggccgagcgcctcgaacatgaggcgcattttgaccggagtcaggccgtgcagcacgtcgaattgctcgacgattctggtgatctgccccagtcgtttgatcttgccacgacgcgtcagatggtagcgcgtggcgaaatcgttcctgcgtccgaacagtgccagcgtttcgtcggatacgctcggagtcgccttggtaacggtctgcttgagcgtgtccgacgtgtcgacggaccggttcgccgccgcctcacgttcggctttcgcaggcgtcagaatagggtcgaccctgctggaaagcggggtcgaccctgattccggcgtagcgcgtgtgggcttggtcactcggccttgccctcgtcagcgggcttgtcggcggcactggtgtcggctgcggcagcagctttgtcgccggcttcggcggcggccttcttggcgtcatccaccgtctcgctcaccttgcgcttgagctcggtgttcagcgccttgccctgctcgaccgtaatctcacccttcttgacgagttcgtcgacgagctcgctgctcttctcgtatccggtggcaagggctccgatgcccgccagcaggaccttgcgcaggccatcacccagaagatcaaaatcagccatgatacccctccttcgaggtccgacatggcctggtgccatgtctcgtaccaccaagcctagcgcaaacaacagggcaatgtactagaccctcagactgatttcgactgatttttcgctgattggtacttaccgaggactcaccgagaattcaccgaggacgttcggcggcagccttgcgcgcgttggtggctacttgatcgagccgggcgagctccttggcttgttcgggggtctgatcggacgtatcgaacgtaccgtaacgacgagtcacggcagtttcgataaggaaatcgctgatggcggggtttttaggcagcaacgagccgtgcatgtaggtgccgatcacgttgtgcacgcgcgcgccctcggtatggtcttcgccattgttgcctcggccgtcctgattgacggtgccgagtggctgaacgccttcgcgcaggaaggtctggccggagtggttctcgtagccaatcacatcgccgaactggtcggaatgctcaacaagattgccgatcatacgcacgttctggcccacggtataagcaccgataacgccgatgccgtccagacgggtgccgtccacggtttcaaagtactcgccgaacagctggtacaggccgcagatcatcagcatcggcgtaccgtctgcggcaagcgaacgcaacaggtcggcgcaatggtagaagtcgtcgatgattttcttctggccggtgtcttggccgccgcctcccagaataaggtccacctggtcgggccagtcgtcgccttgattgtactggtggacgaccggttcataaccgtacagttccagacggcggcggatagtcagcacgttgccggaatcgccgtagatgttcatgtctttgggatacagggacaccacatcaattgttctggccatgtcacgttctccttgtcgatgtcttcccgctgacgggaagcgtcttattcctcaccatgtcctcccgcaggcgggaggtggcgcgcgggcgctagaggatagttacttgcccacgcccgcgtcccgtacttcggtgatgcggcccagtacggcgcgggttttgagcatggcggtgtaggtgcagtagatgtgcttgcgtgtgccgggattggcgttgacgaatgcggtgacggcctgttcgaggtcggtgttcgtatcggcgactggcacttggtcataccccaggcgcaatgccatgtcccaggcacgcacgccggagaccatggcgacaccggacgcgcgcagggaagtgaagtccacgtcccacagccagctcatgtcgcggccgtcggcatattcgtcgttgatggcgatcatggtgtccgcgttggccgggtcgaagctggcgagcgagaggcggaagcccatcgggttcttgaccagcagcagttcgaccggggaaccgttgacgtcgatgacctcgccacggccgaaagccggcgtgacgcgggaaacggcggcgatgagctcgtcggcggacacggcgcaggcgttggctgcggcggtggccttggatgcggcggcattgtcttgcatcaccgcacgtaccacggcgagcgcggcggccgcgttgtacaggttgtagacgccttcaagcttgacgtcggtggcgtagccctgaccgtccatctggaaggtggccttgtggtcgcccacggcggtaagtgtcacgtcggcgggaagttctgccgtgcctgtggaagctcctctcagttcgcttcgcggactgaggggagttctggctgaggggagcggcccggccacaccttccaccgacacggtcgtggccatgtcgtcatcggacgggaaatagtggcgcaaatcgtcggcgaggccgaagtatcgcacggtggtgccagccggggccttcgcggcgagcgcggcgatacgcgggtcctcgcggttcagtaccacagtgccggtagtcgccgcagccacatggctgagcagtttggccgtggtgtcgatttcaccgaatcggtcaagctgatcgcgcatcacgttcagcagcaacgcataacggggcttgacctgcttgacgaagtggacggcgtacgcctcatcgagctcgagcacggcgatgtccgcgtccaatttgccgccgagcgtgacttcggtaagcagtgcggagaccacgccgcgcacgaagttcgagccggtcggattggtgaacaccttcagccccagatcggagagcatcgaggcgaccatgcgggtggtggtggtcttgccgttcgtgccggacaccaataccgcgccaagcggcaactgcccgagcgtacgggtcaggaagccggggtcaatcttttctacgactttgccgggcaaagccgaaccgccatgtttggtgacgcgggatgcaaaccgcacgaagcggcctgcggccacggtggcgaacgcataccacggtttgcaggtctgtaccacggacgattggtcttgcgaaacatcgcgtgaaacgttgcttgccatcatcacaccccctgattggcgttgtagtcctgcggcatgtctttgaatttggacgtggcaccgaggaaggcgaggtggaaggtttcggtcgggccgttacggtgcttggccatgatgatatcggcctcgccagggcggtcttccttgtcgtagaagtcagggcggtggaccaggaacaccacgtcggcgtcctgttcgattgagccggattcacgcaggtcggagagctgcggcttcttgtcgttacgcatttccgggccacggttcagctgggaaagggccacgaccggcacttcgagttccttggccaagagcttcagggcacgggagaattcggacacctcttgctggcgggattccacggccttgcccgaggtcatcagctgcaggtagtcgatgactacgagtttcagatcgttggtctgcttcagacgacggcatttcgcacggatctccatgaggctcatgttcgggctgtcgtcaatgaacagtggcgcgttctgcatcttggtccagaactggttcagggtgttccagcgttcgggggtgatgtcgtcggcgcggcgcagggcggccatcggaatattggtttcggcggagataatacgctgagcgagctccaccttgctcatctccaagctgaagaccacggaagtcatgttgtggtgcaacgcggcggcgcgggcgaagtcgatgccgagcgtggacttacccatggccggacgtcctgcgacgacgaccatctgtccgggctgcaggccctgggtcacgtcgtcgatgtcgcggaagccggtcggcacgcccttgttgacgaggccttgctgcagtttgtccagctggtcgagcgcgtcgtggaccaccgggccgatggcggcatagtcctgacgcaccttgcccatcgacatctcgtagatctcggactgggcgaggttaaccacatcctcagcctgcgatccctcggcggaataaccgagctgggcgattttggtgccggcggcgatcacattgcgcaaaatggcccgctgatggacgatctccgcgtagtacatggcattagcggcggtcggtacggatgcgacaaggctgtgcagatagtccgcgccgccgaccttgtcgaggttgccatccgccaacagctggttggccacgagcaccacgtccaccggctgactggcggaaaacagatcgatgatcgcgttatagatcgtctgatgcttgggctggtagaaatcggtgacgtcaatggtctgcgagacctcgccgatggcatccttactcatcagcatgccgccgagcacggccatttccgcgtcgtcatcatgcgggggcacgcggtcgaaaatcgggtcgccggccgccgccgacgtctgcgtgccgccccggcccgcgcggtcgccacgatcgccacgatccaggccaccgccgaacccattctgatacgagtgttcacttccttctggcatagcctccaagtataggatgtggcgtggcaggtgaacgatatcgtatggaaacgaaacggttgcccgcatcggttcattccttattcacctatgagtcagcgccgcgacacgcagaaagcaaaatgtggatagaaaaataagttatccacattttggggataattctggggataatccactaagttatccacatactggggataacttggtggatagtctggggataacattccgcgcccacaacaggtgcttgcgcaacgcagtcaggcgtgatatgcgtgtgagcgtgcccatagactcttccgacgccaaagccaccagttccggcgatactacacgccgcgatggcttcggcaccccgcatgccggcgcaaacacaaacgtcagcaacggcccgaccgacgcccgctccaccaaccgccggatcatggcgctggccctgccgaccttcggccagctcatcgccgaaccgaccttcatccttatcgacacagccatcgtcggccatatcggggatgcggcgttggccggcctgtcaatcggctccaccatcatcctcacggcagtcggactatgcatattcctggcctactcgaccactgcgcaggtggcacatctgctgggagcgggtcgtcgtcgcgagggactgcaggcaggcattgatggcctgtggctggccttgagcatcggcaccgtactgggattgggattgttcgcggctgccgagccattatgccgggcactgggcggtcagggcgaagtattggaacaagccgtgacctatacgcgcgcaatcgtgctgggtgcgccaggcatgctgatggtatatgcggcgaacggcattttccgaggattgcagaaggttcgtatcacgctgatcgctgcggtgggcggcgcggtggtgaacacggtgcttgatgtgttgttcgttattgtgctgaattggggcattgccggctccggagtggcgacgctggtagctcagtggttcatggggctgttcctggtaatccccgccattctgtggtcccgggcggatggtgcgagtctgcggcctcgtttggccggtattgcggcagccgggggcgacggactgccattgttcattcgcacattggcgattcgtgcggccatggtgactacggtcgcctgtgccgcgcgcatgggtactgccgtgttggccgggtttcaggccgtgaactcctcttggaattttgcgatgaacatgctggattccgtgggcatcgccggccagacgctggtggccacagcgctgggcgctggcagcgtgcagcaggcgcggcggctgacgcgggcgaccgggcgtgcggggctggtcaccggcgcggtaatcggcacggcttttgcggtagtcggcctgttcgccgggcacttcttctcccctacgccacatattcagacgctgatcgccgtgggcatggtgacgatgggcatcttcttcccactgcaaggctggatgatggcaatcgacggcattcttatcggcgcgcgcgactaccgctatctggccgtcacatgcacgctgaccgccgtggtgtatgtgacgctcatactcatactggccaatatggtgacgccggcgctgacgagcgacctgatgcgtaccgccgtgctctgggccgcgttcaacgtggtgctcatgggtgggcgcggtctgtccaacggactacgcgtgcgctcggacgcatggatgaggtaggtatcggccgcgcgaagcgctgggcgattccgtttacatagcggcgcgggcggcggaatacatgccgcggacgatttgttcgcgccacttggaccagccgtattgcttggtgatggtctcaccggcggtggcaccgagcgaggagccgtcggcccgggtcaggtcgaacagcatatccagcagcatcttgtcgtggtgcaagcggtcggccaactcctccgccacggccggatcataggggtccttacccgtggcaaattcggatagcgtcaaatgctcacgcaccagcacggtagcccagtcgacgatgtccggcgcgtagcccatacgcttgagaatcaccggcacatggcgggcaccctcggcggcgtgatcggccacgaacgcgcgcttgccgatgtcgtgggtgataccggccaacagcaatgccttgaaatgatcgtcatcgtaccgtccaccggacggtgtctcacgacccagacgcgacgtgacctccaccatatgccgatcgatggtgtaccggtgggcggccgaggcggacggacggttgcggacgccgagccattccggcatccatcgacccggaatgtccacgaaatcgatgctctcccacacttccataagattcgatccgcacgcaagcagacggataaacagctcgcgcgattcgtcatcccactggttgtcgtgaatcgggcagcgcttcagattaaccaaggtagacgggttgatgggaagaccgaattcgccggccgccacggccatacgcaacgccagcttggcatccttggcaggctcggcaccgggcgccaacaccaattcgccttcgtgcttggccacgccgggagccaccacgtcgaattgcggggcttcgcgcttgccaccagagcgctgagagaacatctggaagaacgcgaatcgcggcttttcgtgggtcagcgaatgttcggcgcgggaagcggtggaatcaagcgagaaggagatgcgccggccgatacgggcaagcagtgtctgcaaatcgtcgatcgagtaggcggcacgctcgttttcgggccaagtcggatcggcaaggccaagcatggcagccactttggcctgatagggcgtcagcatcaggttggtatccttgccggccaccagatggatgcagtcgcgtacgtcgagcagacgttccacagcttcgtcgtaaatgccgtgcgggcggtcggccagccatgaggcggcgagcgcggagacgagcaccgaatcgcgcaaacccccacgggcctccttgatatcgggctgattgacgtattggagccggccgaattcgtcgagtcgggctttggcggagtcgagcagttcgggcaggcgcttgcgggcggccttgcgccagcgttcgaggatggacgtggcggtggtggtgatcagagcggtgtcgccggcgatgggcttcacgtccagccagcccatggcggcgggaaggtcatggtcggtgacttcctcgcattgggcgcgcgtgcggatggagtggtcgaggtccagaccgctgtcccatagcgggtaccagagtttgttggccaactcgttgagctgctggtcgttcaacgtgcgaggctcgtagatgatgaccaagtcgaggtcggagctggggcccagttggccacgtgccagcgagcctaccgcggcgaagccgatgccggagtcgggcacggggaaagagacatccttgcaggccgcattccacagctcagtgaggcattgcatggccagttctgtgcgggctttgcgcttggtcgcaccattccggtaaacgccgtcgtcatccggctggctcatatccatgaatcgttgtttcaagccatctactgctgaagtcattgcttcatctttcattgctaaaaaaagtccccgcacggcgtcaattcgcggcgtgcggggacctttcctatgcagtccatccccttctaggcatggacgtctgtgttatcagatcgcggcggaaccggtctcaccggtacgcacgcgggccacggagtccagcggagcgacccacaccttgccgtcaccgatggtgccggtgccggcggacttgatgatcacaccaaccagcgtttcggcatccgcgtcatcggacagcacttcaacgcgaatcttcggaatcaggtccacggtgtattcagcgccacggtagacctcggtgtggccgcgctggcggccgtagccgttggcctcggacacggtcagaccgtgcacgccggcggccgcgagggcctccttgacatcgtcgagcttatggggctgaatgatagcggtgatcagcttcatttcacttcacctccttgagaacggagctggcagtaccagcaaaatcgtaagcacgttcgccctggtcggcaagatcgatgccgccgacttcctgagcttcggtgacgcgccaaccgatggtcttctccagagcgaaggcgatgatcgcggtgatcactgcggagtagaggatggcgacgagagcgatgaccagctgaacgacgagctgcttccagtcgccaccagccagcagaccggtgccttcaccgaagaagccgatgaggatggtgccggtgaaaccaccaacgccatgcacgccgacgacgtcgagggagtcatcgtagccgaacttgaacttgagaccgcaggccaggcaggtcaggacaccagcgatggcacccatcacgatggcccacagcggggagaccacatcggcggccggggtgatggcaaccaggccggcgaccatacccgaggcggcacccatggcggtgtagtgaccggagcgaatcttctcggtgaagccccaagagagcattgcggctgcggtggcggcggaggtggaaacccaagcgtaaccagcagtaccgttggcggcgaaggcggaaccagcgttgaagccgaaccagccgaaccacagcaggaaggcgccgagcatcacgaacggcacgttgtgcgggcggaacggctgcgtgccgaagcccttacgcttgccgatgatgagcacgatgatcagggcggcgactgcggcgttgatgtggacgacagtaccacctgcgaaatcgtgggcggcagcgccgatggccttggagatggcgccgtcagcagacagcagaccaccgttccagaccatgtgggccataggagcgtagtcgaaggtgacccacagcgccacgaaaatcatccaggtgctgtacttcacacgctcggcaatggcgccgcagatcaggccgacggtaatcatcgcgaaagcgacctggaaggcaacgtccacggaaaccgggtagttgttgccgttcagaccggtggcggtgaacacgccgtcctgggcgaccatggagtccttcagcaggaagccgctggccgggtcgccgaagatgcctccgatgtcggaaccggcgtaagcaatcgaccaaccccacagggtccagataatcatggtgaccgacagggcggccgcctcaagcatcagcatgttcaggacggccttggcacgaaccataccgccgtagaagaacgccacaccaggcgtcatgaggaaaaccaaggacgcggatgtcaggatccatgcggtgttaccggaatcaatcgctcccatgtctacctccctctctttcgttcagggcaccgggggctttgcgcggccggcgtcgactttgtctctacaatgccgtcccccttgtgggggctaacagttcgtcagtaaaagccggtctcgttttggtttcgttacggcaagttacgcgattgttaagcgcacctgacagttaggttggtatcggatgggctggttccggcatgattccaacggatatgggaaagccccgaatcatgtttcgaatatgattcggggctaggtttggtgcgttgcgggcgtttcccgcgcccacaacgtggacggacgcagggctcccctcgctgaggggaactgtcgagcaaagcgagactgaggagagctcgaccgtctacgcgagaatgccgtccacgaaaccttcgggatcgaaaggtgccaaatcgtccggaccttcgccaagaccgacgagcttgaccggcacgccgagctccttctgcacgctgatcacgatgccgcccttggcggaaccgtcaagcttggagagcaccacaccggtaatgccgatggcttcggcgaacaccttggcctgggccatgccgttttggccggtggtggcgtcgagcacaagcagcacttcatccaccggcaggttcttttcggtaacacggcgaatcttgccgagctcgtccatcaggttcgacttgttctgcagtcggccggcagtatcgatgatgagcacgtccgcgttcgcttccttggccttggcggatgcctcaaaggcgacggatgccgggtcggcaccgtccttgtcggagcggacgacgggcacattgacgcgtgcgccccaggtttcgagctggtcggcggcggccgcgcggaaggtgtcggccgcgcccatcatgacctgcttgttttcggccacgaacagtcgagccagtttgccggcagtggtggtcttgccggtgccgttgacgccgaccatgatgatgacgctgggcttggcggcacccggcttttcggcattgaggcggcggtccgtatctcgaccgaccagatcgagcagcttctccttgagcgtggcgcgtacttcggctgggtcggctttaccagtgatgcgggcgtcggttctcaggtcatcgaccagttgggcggaagcatccgcaccgacgtcggcaagcagcagtgtgtcttcgacgtcttcccaatcggcctcggagagattgtctttggcgaggatgtcgaacagggccttgccgaacgggttgccggacttggcaagttttgccttgagtcgggtcagtcgagagccgaccgattcgggggtttcaggtttggcgggagtgggcttggaggcaggttgggactcgggcttgggcgcagctgccggttcgggttcggcctgcgcggctggcgcaggctcggctttggccgattcggctgacttggccggctcggcggcagtcgcagccttagcttcctcggcttcggcggccagccgagcgtcggcggcggccttggcgtcgcgggtcttcttgttgtcgggggcaaccttgcccatcgcacgatccaaatcgcgcttgcgggacttgcccaaccagatgctcagggcgattacgataaccgccgccacaatcacgccaagaacggcgagcacagtattcatatccatacctgtcaagtctagcccgcagatggaatcccctacgaattcggcagtctcaggccgacaattccacccgacgacttaagctgaaccgcatggcacattcttcacgtatgacgtcgctgcagcgccgcgagcagctgattgaagtcggacgctcgctattcgccgccaaaggcttcgaagcggtaagcgtggaggaaatcgccgcgcacgccaaagtctccaagccgattgtgtatgagcatttcggcggcaaagagggcctgtatgccgtcattgtggatcgtgagatgcgcgcgctgaccagtgtgctcaccgccgcgcttgacgatccgaccgtgcacccgcgccagattgtggaacgcacggcgcttgcgctcctcacctatatcgaagagaatgccgaggggttccaggtactggtacgcgactcgccgagcaccgacccgtccggctcattcagctcgctgatgggagacatcgccgtacgcgttgaagacattctttccgaaacattcaaacggcagaagctgtctgccaagggcgtgccgtactacgcgcagatgctggtgggcatgaccgtattcaccgggcagtactgggccgaccggccaaaggtgagcaaggagcagctggccgcatacattgtggatttggcctggcatggcctgagccggcttgactccaagccccagttgttctttgagggcgccaaggcgcggaaggaggccgagcgccgagccaagcgcgagtccgattccggcagcccggattcagaccagacgagttctgcccaatcggatcccgagcacgccaccggggaagattcagggttgcagaacatgagttcaggggcacaggttacgcaacactctgccgagtcgggagacgaagtgctacggtttgaacaggaaactgaacataacgactaaatatgtgaggacgtaagactttcatggccagcacggcaaagacgctcacctttgtgatccccgcatacaatatggagtcctacctcgaccgttgcgtgaactcgttgctttcggcaagcgacatcagcgacctcgaggtgctgattgtggacgacggttcgaaagacggcacgctggagtacgcgcgcaagctggaacgcaccaatccgggcgccgtacgcgcgattcatcaggagaacaagggccacggcggcgcggtgaacaccggtatcgcggcggcgaccggcatgtacgtcaaagtggtggatgcggatgattgggtcgacccgcaggccatcgacacggttctggccacgttgcgtgcacagcatgacaccgacgaaccgattgacatgctggtgaccaattacgtgtatgacaaggtggccaagcgtcacaagaccgtagtgaacttccgccgtgtgatggaggccggccgtgtactcggctgggatgacctgggcaagttcggtctggcgcagtacatcatcatgcatgcgctcaccttccgcacgcaggtggtgcgcgattccgggctgaagctgccggagcatacgttctacgtcgatttctattactcgtaccagccgttcccgtgggtgaagcgcatccagtacctcgatgtgccgttctaccactacttcatcgggcgcgagggtcagagcgtgcagaccgacgtgatgattaagcgtgtggaccagttgcggctcgtcaatcggctgatgaccgaggccacgcccgaacgcggtacggtgccggaggggctgtaccggtacatgattcacttcctggcgatcgaatcgtgcgttacctcggtgttcctgattctctcgcgcgatccggccaactacgttaagaaaaccgagctgtgggatgcgattgacgcctattctccggccatcggcaaggatgtgcgctcgcagctgatgtcccgcgcgctcaatctgcccggcaaaaccggccgctggatcgtgcgcaacggctatctcatcgccgaacgcatcgtcggctttaactgattcggattgtggttttgccctgctgacgcgttatcagcagggcatccctattacctccccagtcgaggttttactactcggcccaacggtcggacatcgcgaagctgttgtgcatcaggttgctggaggtgtatagcacgtcgttcagcagcttggttgtgtgctcgcgcaggtagtcggccatctcgtcgttggccgcttcgagcgcatccgccacgccttgcacatccttctcatcgccgtggccgccatcgagcggccatgcattcgtatccgtcgattcggcatcgcttcgagcaagcaactgctcatccgtgcgctcgatgagccggtgcccgaacgcgcgcacgccttctgcatagccctcgatgaaccggttcgtctcataccaatgcgcgtcggccacgacggcgatcaggcggttcgtccaatacaggttgccggtggagacttcgggcgtggtgtcgcgcaggtaggcaggcgtgtcgttgacgttcgcgtagaacggcgcggcggcggtgaacggaccggagccgaacgatacccacatcaccgtgcgattggccgccggcacatacgggcggacctgaatcgccaccatatggccggtgcggttcacgccgatcggacggtaacggtggcgcgattccgccgtgccggtcgtgccgtacgggtcgtacggcgtgccttcgaagtgcgaggacagcaggaaatcaacgtcttcgaggctcaccttgtcttccggcacgcggcaccacgggatgtcgtcggattcgggcgtgtagcgggcggccggcgaatcccagtcctcgctggggttgaggcggcgttgcatgtaccaggcacgcggcgtgttgtagatatggtccttcggcgtcgcggtgccgaaggccttgcgcgggttgaaacgggtgggaagggcaacggttgttccgaatccggcgctatgcgcgtgacggccgttggaagagaccggcgttcccattgtgcggtcgaggtgatgcgtggccatgaactcgcgcaggtcggcgctgcataggtattcgcgctgctcgccgaacgcatcggcgaggtcgaagtcgtcgatgccgagctggttggggatcgtggcatagcagtcgtcgggcactcggcgggcgatccaatggtggccgccgatggtctcgacgtaccagatctcgtccacatccgaaataatcacgccgttcgattcgtaggtgccgtaggtttcgagcagttcgcccaaccgcgcgacgccctcgcgcgcggtggtgacatacggcagcacaagggtgatgatgtcttcctcaccgataccgccgggctgctcggcctgataatcggtgctgtccggttcgccgacagccggccgcaactcgaccatcgggtccgcaccgagcacgcgctcgttgacagcgatggtttcggtggcgctcatcgccacgttgtgttcgttggcaccggcttcggccagaatgccacgattattcagcacgttcggtgcgatggtgtaccggcaaggattgtccggtagttcgatttcgacatggctcagcacgctgcggtagtggcgcggctggtcgtcgggggcgacagcgacgaagcgcttgggatcgtaacggcccgagcccgaatcgtcatcgcgggcgatgatggtggaaccgtcgtaactggcatttttgccgacaagaatcgtggtgcatgacatgggacaccactctaggagccaggctggtcgaaacaaaaaaatccttggaaccattgcgattccgaggatttgttgtgccccctgtgggattcgaacccacaacccacgacttaaaaggacgctgctctaaccgttgagctaaaggggcaactcttctaaaatacacaccgttttgggatatttcaactacggcgttgcgtacacgtttgcgtacgcgattggcccaacgcacggcacagcacacgcaatgtggcccaaatcgcagcccaaatcgcatatcgcctctagcgatagatagccgccggcgactacccttgtacattatgagtgaatcccccaattggagcaatcccctgcgcgactcgcgcgacctcagactgccccgtatcgccggcccatgcagcctcgtcattttcggtgtcacgggcgatctggcacaaaagaaactactgccggccgtctacgacctggcgaaccgtggcctactgccgccgagcttcggtctgaccggtttcgcccgccgcgactggacacaggaacggttcatcgaattcgtcaaggccgccgtccaggcgcattgccgtacgccgttcaaggagtcgacttggcgcaatctggccgccggcatccgcttcgtgcagggtacgttcgacgacccggaggccttcgagcgtctaagcgccaccgtgcaggagcttgaccgcgaccgcggcacgcagggtaaccatgccttctacatgtcggtgccgccgcgcgcattcccacaggtcgccaagcagctggccgcctccggcctgtcgcgctcgtccgagggcgcatggcgccgcgtgatcatcgagaagccgttcggccatgatctggccagcgccaaggaactcgacagcgtggtatccgaagtgttcgacccgagctccgtgttccgcatcgaccactacctcggcaaggaaaccgtgcagaacctgctggccctgcgtttcgccaacgccatgtacgagccgatctggaacgccaactatgtggaccacgtgcagatcacgatggccgaggacatcggcatcggcggccgcgccggctattacgacggcatcggcgccgcacgcgacgtcatccagaaccacctgcttcagctcatggctctgaccgccatggaggagccggtgagcttcaccgccaaggacctgaccgccgaaaagaccaaggtgctttccgccgtgcgcctgcccaaggacctcgccgccaacaccgcgcgcggccagtacgccaagggctggcagggctcgcacgaagtggtcggctacttggaggaaaaaggcatcgaccccaagagcaccactgaaacgtacgccgccatccgcctcgatatcgacacccgccgctgggctggcgtgccgttctacctgcgttgcggcaagcgcctcggcaagcgtgtaaccgaaatcgccgtggtgttcaagcgcgccccgcatctgccgttcgagcagaccgccgtgcgcgaactcggcaagaacgccatcgtgattcgcgtgcagcccgacgagggcgtcaccatgcgcttcggagccaaggtgccgggcggctccaccatggaggtccgtgacgtgaacatggacttcagctacggccgctccttcaccgagaactcgccggaagcctatgagcgactgattctggacgtgctgctcggtgatccgccgttgttcccgaccaccgaagaggtgaacctcagctgggagatcctcgatccgattgaacaattctggtccacgcttggccagccgcaggcctaccgcgccggtacgtggggtccggcacaggccgacgaaatgctggcgcgcgacggccgccactggaggatgccatgatcatcgatatgccgaacacccgcacccgcgagattgcgcacaaaatcgaacagctgcacgaggagcgcggcgaatcggcgaccggccgcgtgctgacgctgctcatcgccaccgaggacgcggacctagagcatgcgctggaaatcgcgaactcggccagccgtgagcacccgtgccgcgtgattgccgtagtaccggataccaatcctgccgatcagtccggcgaaggcgaaccgaacgcggccgaagtggccgccgaggtgagcgcgagtcgcgataatccggccgtcgatttgaccgacggcccgaacgatccgaacgattccaacctgaacgcccaagtgcgattcggcgcggacgccggtgccggtgagatcatcatcttgcgtccgcgcggtggccttatcaaccacccggatacgctggttatcccgctgcttgtgccggatgcgcctgtagtggcgtggtggccgaccacaccgccgtcgaacccggccaaggatctgatgggtgcgatggcccgcagtcgcatcaccgacgcgttgcactccaataatccggaggccacgattgagcgtttgcgccgcaattggacaccggaagatatcgacttgtcctggacacgactgaccgtctggcgcgcaatgctcgcctcgatgctcgatcagccgccgcacctgcccatcaccgccgcgaaggtgaccggcaaggccgacttcctgcctatggaaatgctgtgcgcatggctgcgtctgaaacttggcgtaccagtcgaaactgagttcgtgcccgacgcgcaggccgtgaccggcgtgtacctgacccgtgaggacggtgtgatctcgctggaacgcccgtatgaggaccaagcgctgatctcgctgcccggccagactccgcaggaagtgtccgtgccgatgcgcaccatcgaggactgcctgaccgaggaactgcgtcgcatcgatcccgatgagatctacgccgaggtcatcaacgaaggctgggatctgattcgtcactgaagtcggtagaacccgttgccacagcggcgttggaatgagttcggcaattgtggccgagccatgccaacgccgttgctcatcgtttcctacctcatgcgatgccgaagctcatgcccgcggagtaataaagtgacatatgcgatgtcgcacaatgtggattgtgttgtcaactgacaacacaatccacattgcaaagtacgacacataccccatacaaggaccatacatggcaactcgaaaactcattgtgtatccgaataaagatctgatgattcaggctggcgcgcaacgttttgtcttggcgctactcgatttgctcgccgaacgattgcctgatggcacgcatcgcacgcgtgtggatgtggcgctgtctggcggttcggccgcgcagccgctgggcttggtgctgaacgatccgctggctgacgcgattgattggtcgcgcgtgcatttctggtggagcgacgaacgttttgtgccggcttacgacaccgatcgcaatgctttggaggcccgtcgcctgctgcttgaccagctggtggcagatggcaagctgcctgagtcgaatattcatgagatggcggccgatacccgttcagccgatgacatcgccgatgtgatggatcaggccgacagcgatgatgcttccgttcgcgccgccgccgatgccgcgaatgatgcgttgctggacgatgtcgcgagcgactatgagcgcgagttggtgaatgaattggggccggaaccggtaatcgatctgatgattctcggcatgggaccggacggtcactatgcgtcgctgttccctggtcatgatgaggtcaaggttactgataggctcaccgtgggtgtgaaccactcccccaagatgccgccgctgcgtgtttcattgaccgcgccgctcatcgcgcgttcacgccatacgtggttcttcgccgccggtgccggcaaagccgaatcgctggcccatgtcttcgagcagcccaacaacccggattacccgtcctcctacgccaacggagtggacgagttcatctggttctccaccgaagaaaccgtcaccgagttgtgagtgaattaagcccccctctgatgagggggcttaattcgtctatggctacgcctcgatctcggacttgccctcttcgccgccggcccctgcaattagggactcgcctgcggcgaggctcagtgttggctcggcggcatagccgcctcgctccgaagagggccggggagcccaccgggctcccctaagcccgagatcgcgaggctacgcctcgatctcggacttgccctcttcggcccagagggtgtggaacacgccgggcttgtcgacgcgaccgtaggtgtgggcaccgaagaagtcacgctgggactgggtcagagcggtgggcaggcgcttggagcgcagaccatcgtagtacgccagggagctggagaacaccggggtcgggatgccggcctccaccgcgcgaacgatcacgcgacgccatgcatcctgcgattcgccgatgatcttctcgaagtacggatcgaacagcagggaagccggcgggttatcgcccctgaaggcctcggtgatgcggtcgagcaggaactgggcgcgaataatgcagccgccacgccaaatgcgggccacttcggacaggttgatatcccagccgtattccttggcaccgtcctgaatctcgttcaggccctgagcataggccacgaccttggaagcgaacagagccttgcgcacgtcctcgacgaacgcggccttgtcttctccggccagatcgatggtcttgttcggtccagccagaccttccttctgagcgtcttcacgcagctcaccgtgcgaagacagtgcacgagcgaacacggcttcaccgatggcagccacaggagaaccacattccagaccagtctgcacggtccacgtaccagtacccttcatgccggcatgatccacgaccacgtccacgaacggcttgccggtctcggcatccttgtggtgcagaatctcagcggtgatctcgatcaggtaggagtcaaggtcgcccttgttccattcagcgaacacgtcgccaatctcctcggcatccatgccgagtccacggcgcagaatgtcatacgcctcaccaatcacctgcatatcggcatactcgatgccgttgtgcaccatcttgacaaagtggccggcaccatcggtgccgatgtgggtcacgcacggttcgccgttcaccttggcggcgatggactgaagaatcgggcccaaggtcttccaggattccgcagtgccaccgggcatcagagacgggccgttgagcgcgccttcctcaccaccggacacgccgcaacccacgaagtggaagcccttggcacgtacttccttctcacgcttgatggtgtccttgaagaaggagttgccaccgtcgacgatgatgtcgcccggttcgaacacctcttccagctgcgcgatggtcgcgtcggtcggagcaccggccttgaccatgatgatggcggtacgcggacgcttcagggacgcggcgaattcctcgagcgtttcggccggcacgaagttgccttcggtgccatgctcgttcatgagcttctcggtacgcgagtagtggcggttgaacaacgccaccgtgttgccatggtgcgccagattacgcgccagattggagcccatcgtggccagtccaatcacaccaatgtttgctgtagcttcggccatgtgtcttgcctttcgtttgattgtcccatcgtcatcacgcgcgtcacaaaacagcgcatcagcggagggaatcattccttcaacgcttgaaagtgtatcccgcttaccacccacacgcgagggctgtcttaggttctacgcaccttctgcccgcgaagcgtaattacttgccggccattcacatacgcccggccttggaagggtcgatatgcatggtctggaagcgattggccatgtaagcgtcgctgtagcgttcgctgaaccacatcgcgaccggtgaatcctgcggctggccggccatgcgcccataccagcaatccaaggccatcagcgtgaaggcaatgtcgatcaccatcagcaccgtgcataccgcagtcagcgaataccgcgctttccatggaatgcgattaatcagagccagcagtcgcggtaacagccacttgacccacaccacaccaatcagtccccagaagaacatgaattggcctgaagtacgtccgtcgatggacagccaacggccggtgtaatcccacgcggtaataccaaacgccgcttccatgaaccagctggtgcaatattcgaacgcgccgccgatcaccgccgaagcgcagaaaatcaagaacggattcgccttccacaggcgattcaggcacacggttaccaataccgcaccacagccgtaaatcggcgagaacgggccccacagcaaaccagcgcggtcctgaagttcaccgttatacagcgccatatggtagatcgtctccacaatcaggccacccaccgaagcgatggtaaacagccagaagatattgaaaaagtccagcgcaatatagcccttgccggactggtcgcggcctagcatgccggccgccacagccgattcataatcatcgcgatcgtccatacgcctgagcgcgcgctgcagacggcgttcctcgctcagggagggatcggcggtcaccgaaatcacgacgagaataatcatctgaatcagcggcagcagcaggttgaagccaaggccggtcagggccagcgacagcatgccgtcggccaatgtcaacggcatcagcacgtaggtccagcgcgcggcataccggcgatgattgcgcagcagcatcacgccgaacacaatcaggcatgcggcactgactaccagcaccaccgcatgaatcgcggacaggatgaaggtcaggctcatcgcatcgacgtgcacatgaccatccagaatctcgcgcacggcatagaggatggaaatcaccataatcggcaatgtggcgagtccgtccagcagcacgaccgcgccatagatgcgcgccagaatcggtaatcgcttggcgttcaggttcaagccggcgtcgtccagttcgacggccaccagatcggccacgactgcggactcggcgtcacggttctcccgcggcttgccgggggtagtggccgtgccatcgtccttgaattcaaccatggtttcctccccacatagcgtccccttacactatcacccgattgcagttttgccgaacttgatggacggccggtacatgtctgtctacattgccggacaccgagcccgctatcgctttcagaaagcatccaaaaaccatccagaaatcttgtcaataagttccagaacgcctttcgctccagtcaaggcactgacggccagtccggcaccggcaacagctccggcacaggttctgacacttccggcaactccagctccgaccagtcatccagccagaacgagcagtcggccatcgatggccaatccggcaccatcgaaagctgatacaacggtttacccatggggcggtagctctctcatgaggcggtaattaccccatggggcggttagcccaaaaccgcattccgcggaataaagccattttaagccaccgccccatgggaattttaccgccccatgggccacttaccgcccgatgaaggttttaccgccccatggagggcagcctcacaccaacacacacagcacacccggccacacagcaccccagccacaaaaaattaggcacaatgcccagcgacacacgataagccgctgggcagcggcgttattccgccaaaaacatcatcaatcaccccattaatctccggcagccgtattacgctactacaaacgtagcgctacgattaacgtatcgctacggaaaacgtagcaaccaagcaacaccaagctccggaggtatcagtgggcaatatcttcaaggtcctcagacgcgacttcctgcgcctgttcaaggtgccggccgcatgggtgatcctgttcggcatggtgttcatcccgccactgtattcgtggtacaacatcgtcggcttctgggacccgtacggcaataccaaaggcatcaccgtcgccatcgccaacaatgacgacggcaccgacaacgcgctcatcggcaagcaaaacctcggcgatcaaatcgtcaagcagatgagaagcaacgaccagctcggctggaccttcgtcaccgaagccgaggccatggaccaagtggaatccggcaaggcatacgcagccatcatcattcccaaagacttttccgacgatctcgccggcgtggtgaccggcggcaagagtcggcccactctggagtattacgtcaacgaaaaagccagcgccatcgcccccaaagtcaccgacgtcggcgcgtccactgtggaccgcacggtcaattccacattcgtctccaccgtatccgaagtacttaccgaagtcatcaatacggttgacggcaaagccatcagtaccgaagacaccaccaaagccaaggccctcacggcccttgccgaggcctccgacgatgtgcagcacacacgcagcaccatcgccaagctcaccaccaaactcaccgacaccccagagcagacacgcaccgcacgtcaggcgctggacgacgcacgcacacttggcatcgacactgcagaaggtctggccggcgtctccaccctgatcggcactacccagaccagtctgaacggcttcgtcacctccacgtccgaagcgcttgaccaaggctcaagcctgctgagccaagccgcagcacaggccaaccaaagcgtgggcacggtaaccggaaccatcagcgccgccaatcagcaggtaggcggactgatcaatacggcggaagacatcaaccaagcgaacgccgacatcatcgaccaactcaaagggctgccgaacgccaatcgagaaccgctgcaatccgccattgccacactggaaagccgcaatagcgagcttgccggcgcactgggcaacctcgatagcctgaacaccactatcggcaatgcctccacagacaccgccggattggcgcagcatctcaataccgccacccaaaccacggtgcgcgaggccaataccgctcgcggcaccatcacctccggcgccattcctcagctcaacaccggtctcaacgccctcagctcgaccgccagcactctgtcgaccggcatcacgtcgcaaggctcactcatcgatcagtcgaagcataccctcgaccaactcgacaaagcagcctccaccacggtgaccgcgctgcgcgacaccgataaggcgctggccggcgtacaaaccaagctcgatacgctggtcaccgacatcaaagccctgagcatctccagttcactcagttccctgatcggcaccgacggcaaactggatgccgccacaatcgccgacttcatgctctcccccactgttatcagcgaacaggccgtctatccggtcgcctcctatggttccggcatggcaccgctgttcaccaccctgtctttgtgggtgggcgcgttcgtgctcgtggtcattcccaaactcgaaaccgacgatgagggcatcgacgatctcacgccaacccaaggctatctcggtcgcttcctgctgctggccacgctggctgccgtccaaggcctggtcacggccatcggcgatcttgtcatcggcattcaatgcgcgagcgccccagtgtttctgctcacctgcgtcatcacctcactggtgtatatgtcggtgattttcgccctctccaccacgttcatgcacgtgggcaaaggcgtatgcgtggcgctggtcattctgcaggtgccgggcgcctccggcctgtacccgattgaaatgatgcccgcgttcttccgcgccatctacccgctgctgccgttcacctattcgattgacgcgatgcgtgaaaccatcggcggcttctacgacggcctctggttcgcctatatcggcaaattgctgattttcgtggttctggcctttgcgcttggcctcggcgcccggccgaaactggccaatctcaaccgcctgttcgcgcgggaaatcaaggaaagcgacatgattatcggcgagccggtgcacatgcccggcagcgaataccgtgtcactcaggccattgcagcactggccgaccacgacgaataccgtcatgccatcgaacgtcgggccgccaaattcgcctaccgttatccccggctgctgctgggtgcgcttatcgccggattcgtggtgccggccgcgctcattatcgtgtttgcgctgaccaccagcgagaaaatcgtagtcatgggcacatggctggcatgggtgctcatcatcatgggcttcctgatggtcgtggaattcatgcgcgattccatccgccgccaaaccaagctcggcaacctctccgacgagtcgatccgcgccatgctgtacgggcataaggccaagcgtcgcgacacctccgccgaacgccacgaagaagcggacccgagcgccgccgttaccgcaatcatccccactattccgccgaccaaggaaggcaggcacgcacgatgaacaccatgtggaaactgtttaccggcgacatcaaacgcctgaccagcaacgtggtctccatcatcatcgtgatcggcttggtgatgattcccggcctgttcacctggttcaacgtggccgcatgctgggacccgttctcgaatatgaagaacctgaaattcgcggtggcgaatgtggatgaggggtatcgttccaacctgatcccggtgaaagtcacggtcggcgatcaggtggtgaacgcgctgcgcgccaacagtcagctcgattggacgatcacgtccaaagccgatgccgtcgagggcgcacgatccggcaaatactacgcggccatcgtaattccgaagtcgttcagcaaagacatgatgaccttcttctccgacgacgtgcagcatgccgaactgacctattaccgcaacgagaagaagaacgcgctggcaccgaatctgctcaacgagggcacggatgaggttgcggcggaaatcaacaccacgttcgctaagaccatcacttcggccgggctggaaatcgcgtcttcgctggccgatcagctgtccaagcccgagaccaaagagcaactgaataccttcaacgccaacatcgccaatttcgccacacagcttgacgatacggcggatctgcttggcacatacagcgcattgaccgatacggccggcgccttgctcgacacctcgaactcactgatcactcaggtttcctctgccgccaaacaaggcggcaaggatcttgccagcgccaaacaggaagtcaccgacgtggccggagccctgggcaccaccgctgacgcgatgagcagcgcactggacgcgagcgcctccagtttcggcgcggtgtccgactccatagacaagctgtattccgacgcgaatgctggtgccaccacggccgccgacgaattggaccgtcaagccacggccattggcaagcagacggagaaatacactgaaattcgcaacacgttggccggcatactgggcaacgactcatccatcatcacggcgattgaccgttcaatcgcacggcaaaacaggctgcggcaagcgctgaatacggcggcgaccgatattcgccaaggcaatcaggacgcgcaggatcagcatgcgcaggtcaagaatctggctgatcaagcacagaacagtattgccaatatcaagtcagatttctcggccacggtgaaaccgcaaatcgactccctgtcgtccaccgtcgctgacgcctccggcatactgagttccggcgccacccagttggactccacgctcggcgacctgaaagggacttccgacgacgccagcgatatgctcagtgacgctcgcactaccttggacaaggtgtccggcaaactgcgttccgccggtgccgaactggcttcgttcaacagcacactgagcgacgcactaaacagtggcgatatgggcatggtcaaagaggtgctgggcaatgatcccgaaacgctggccagtacgttggccgcaccggtgcagctcaggcgcaaggccgtattcccggtggcgaatttcggttcgtcgatggcaccgttctacacgctgctgccgctgtgggtgggcgcgctgctgatggtggtgacgctgaaaaccaccgtgtctcgccggacgcgcaaagcattgggcgatccgcggccgcatcggctcttccttgggcattacggggtgttcgcgctgattgcgctgctgcaatccacggtgtcgctcggtggcgatctgctgttcctgcgcgtgcaggccgtgcatccgctgctgtttatgttgtctggatggctggcctcgctggtgttctcgttcttcacctatacgatggtggtgagtttcggcaatgtgggtaaggcaatcggcgtgcttatgctcatcgtgcagatttcgggtgcgaacgctgcctacccggtgcagatgttgcccgacttcatcgccaaagtcagtccgctcttgccgctcacccatgcggtgacgatgatgcgtgcggccatcgccggcatctacgacatggattactggcgggccgccggaatgctgctggcattcgtgccgccgctactgttgcttgggctgttgctcaggaagccactggtgcggttcaaccagtggtatgtagcccaagtcgagagcactaaagtgctgagctagtaggtattatccgggagttgcctacaaacggcatggacttaccaccctcagtctggctttgccagccagctctcgccagcgggagcgtacgggagcatatttcgaagagaagagatgacggagatgacagatacgacggcgacaccgcgcggtgagcgcacgcgcgaggcgacggatcgcaagctcatgcgagccacgctgcagattgcggtggaccgcggcatcagcggcgtgaccatcgaggaggtggcccggcgctccggtgtggccaaaaccacgatttaccgccgatatcataatgccgacgagctgctgcacgagatcagcgcgatgtatctggccatcccggatcccgacccagtgcccagccccacgcgtgagcatttcacgcaactattgcagcgattggtcgattgggtgcgcgacaacgacatcgacgtcaagcgcgtgggcattgtgttgtccagcgaggccgagttcttccagcacatcgtcgaccaggtggtgaccccgtggctggagcatgtgggggcgttcctcaagcagggagtcgcgcagggcgtgtttcgcgaggacgttgacgagaagttgctgttgtccacgattatcggatctttggtggcgtatgaggccatcgagggcaaagcaatggacgacgacaccgcctgggcctcgcgcatggccgatctgctgtggccagcattgctgaagtagcggtcttactcctgaatcgaagcctcctggcgggcgacttcgagggctttgttgaaggcgtcggaggtccagctggcgccggcgaccttgtccactttgagacccttcagaggtttgccgtccaccacgccgttaatggctttggcgaagtcgtcctgatggttcttggaaatcgtggtgaacgggtgcccaatgatattgacggtctcgacgttgccgtccttgatggtcagatggacgtcgatggaatcctcgcctaccgggccgtactggccgttgatcgagtagttgccgtccttgtagttgccggtgtccttcttgtcggacgtggtggtggacgggtcgttgtgcgacgagctggaatcggagccgtcggagctatcggagccgttcgactgggattgcgactgctcttcctgcgacttctcggtctcgcccgagttgccggcgtacgcatcgtccatcggcgcggccttggattcgccgcatccggccagcagcgcgccagccacgaccagtccggccgccgccaatgtcgcggatttcttcaacgtactcttttcggtcatattcacgctccttaagcccccccctctgacgagggggctgtcagcgaagctgactgggggagagaccatcagcttgccatgtattcctcacatactgctcgatgcccctgacggccctactcctcgccgccggttttcgcggccttggtggggtcagtgaaaccaatggcggtctcgccgttctgcgcgccctcgacctgtgcacccgtggaggcgggcttgccgccggccgcctcgtaggccttgcgcgcatcctcgtcattccacttctcaccgacgagcacgccatggttgagcatgatctcgcgctgcgcgcagctggcgaccagcgcatcgtgggtgaccacgataatcgtggtgccctgctcgtgcagcttgcggaacaggtcgagcacgattttctcgttcttctcgtcgaggttgccggtgggctcatcggccagaatcagcttcgggtcgttgatcagcgcgcgggccacgcacacgcgctgctgctcgccgccggagagctggccgggcaggtggtgggcgcggtccttcaggccgaccttttccagcgcctccatggcctgcttctcatcgaccaccgaatggtagtactgggccaccatcacgttttccacggcggtcaggtgcggcaccagatagaacttctggaacaccagtccgatgaggttcttgcgcacgtcggccagctgcgtggcgttcaggtcctccagcttgcggccttccagcttcacggagcccttggagggcgtgtccatgcagccaatcatgttcatcagcgtggtcttgcctgagccggaggagccgacgatggcgagccattcgccttccggcacggtcagattgaggtcgtccacggcacgcaggtcgccgtagatcttcgagatgtggtcgagttcaagtagcatgacgtttctctttctttattcttcgcgaagcacgacggcggggtcgatgcgggtggcgcggtggacgggcgggatggaggcgacgatggcgatcagcgcgctgaacagcacggaaatcagggccagccaccagttgaatacgatggagcgttcgaacaccgccacgcacagccaactggcgagtccgtagccgattgcggtgccgatgaggccgccaatcaggccgtagagcgacgattcgatgtagaactcggtgccgatggcacgcgagctagcaccgagggccttgcgcaggccaatctcgttgcgtcgctgcgagacgatcgagctgattgtggtgccgacgccgacgagcgtcagcaccagcaccaccagcgagacgatccagaacagcgtctgcagcatggtgatgatgcgggtgtcggaggcggtgatcttggtgacctgctgtgccttgacgtgcatggaggtcatgtcgttgatgctggacaccaggcctgcgaggtcgctggcgccggccgaatactcgatgacgtccacgccgcgcgtgatgccggtgagcttgttgacgtcgacgttggtggcgtagatgatcgagtcttcgctgccgccggtgtccacaatgccggccacgcggaattcggtaccggaggtgtccatgatgtcactggagacacggccgtctttggtttgctggtcgatcgaggatttcgacgaagtgccgttggtgctggcgttatcggatgcacggtagccgatggtgatggcggagccgattctcaggccgatggcgtcggcgatgtcgcgtccgaccagcaccttgccgtcggtcggccacgagccgtcgaccacccagtgatggttgaggttcttgacctgcgccgcattcacgccggccatcacgtacggcgaggcgttgacgcgcacgttctcgtagcggtaggtggcgtatttcgcggaacccttggccttgaccatttcagtggtgtgctgcaccatcgccttgtcgatgccggccttgccgtcagcattggtcgattcggtgggcgtgacaatcaggttcgcgccgtacgcacgcatctcctcgttcatctgctgcggcacggcgaggcagatcatcgccagacagaacagtgtggctgcgccgaccagcgacgccaccacagccatcaccgcgcgcgaacgccgacggaacacggcgctgaacagcattctgaagaacataccggtgttggtcatcggttccctccttccacacctacgtagataaactcagcgaccatggagcacctccgcgggcttgagattcagaatcgaacgaatcgatgaggcggacgccagcagcacggtgacagccagcagcacgaacaccagcacgaacaccatcggccgcatcgtaatgccggaaccgaacaccacccggcctatcagctgggccacgccggaaccgagcagcgcgcccacaatcgcgcccagcagcgagattgccgccgtttcggccagcatcaggcgggataccgcggcatcggtggcaccgagcgccttgagcaacgccagctcgcccgaccgttcgccgatcgaggcgaccatcaggttggccacggccacggctgcggcgatcaggctcagcacggtcatcagaatcatcacggcctgcgtcttttgcagcacattgccctgcaacgcggccacctgacgcacctgcttggccaccgcgcccggaatcacctcttcgatctgataggcgatcgagctcgggtaggcggtgcaataccaggtctcccattcctcctggctcagcgcggccgggttcgcggcggccttacgggccaggtcgttctccggcgtggtcagggccttgacctcgattttgtcgaccgaatcgggcaggtcggcgagcacctgggccgtggaggaggcgatgtagagcgagccgttgtcctcgtcgccggaatcgtagacgccagtgagcttgattttctgctcgttcttcttgcctgaggcggtggttttgttgagggtgatggtgtcgccggtggtcgcgccgagttcggaggccagcgtcttgccgatcacgccctggtcggaatcgtctttgggccacttgccgtccagctgccaccacgagcgcatgccttccacgcccacgacggtagtctcgccggtggagatcttgaggttcttgttgaaccacgtgccgacgaccggcacgttggtaccgttcaccgtggcgtggatgttgagctgcggcgcgaagctggtgatgttgaacgaccagaagatcgtcttgatcttggccgcgtccgactccttcagaaaagcggtcgggtcgctggtggacgtcgcgccgcccgactcggtgttgtacaggtcggaaacgaccgcatccgccttgggctgcacggtgatgttcgaaccgtaggtggacagctcggcgttgagcttgtcgcccacgtcgaacacgacgcccagcatcgatacggacacggtcgccgacaggcatacggtcagcgcgataagcaggcgccggcgcagctgtcgggtgaacgagcgagtaatcatgcgcagaaagaacatgattcttgtctcctgcctgactcaccggaagtgggcgctcagcgcgtccagatccgtagtttgaatggtgatcttgccgtggccggtcttgtacgggaatggtatcgggttgcagccacccttgaagccgatggtcgccaggttgatggccacctcgcacttcttgcagatgatcttgccgtccttctcgtagtagccagcgtcgccgcagttctcgcaggcgtccaggccgatgccgtacgcgccaccgttctttcggatgatgatgaagcgcatgacggtgccgtccttggccttgtattcgaagcggtgcaggtggccgtcctcgacctggctgaaggggatggtggccacgccgtccttgagcgagtaggcttccggcggcgaaagggtgatggtctgatgggtcgcggcaacgcccacggtcagggttgctgtgacgccgatggctgcgataaggctccacacggcagcggcgatggcgtggcggcggaataccttatgccggcgcaacgtggcctcgttggctcccggcacatcatgggttttcatacggaaaccggccacgatggaggccacggcgggaatcaggaacaccagcgcctgcgccataatcatcgtggagttctggttgatggaccaagccagcgccacgaacatcgtatggttcatcgggaagcctcgcgcctgcagaatctgggcaagaccagtgaagtgttgaatcagcagaatcaccatcatggccgcgacggccacggtgaacgcccagcgcacggcagtggtgcgcatcgtgcggaagatggcggccacaataatggacatggccacgccaagcaggaaaccaagagcgcgcagcagcatggccgaagtgaatgcggtctcccctggttccacccagatggtgagctgcagaatcacgtccggcagcgcgtagaacagggtgagtgcgatgtcgatggcggccacggcgttagcgatgtgcatgaacaccttgtgctgctgccaattggtggtgatgcggcgtgcgaacaccaccacgacgatggtcaggatgtcggcaatgatcgcgcaccacaacaccgggtagttgacgaacgtgcgctgattgatcacggccgaggcgcgcaggccggcgaatacgatggcggcgatcagaccgacgatcaggccgatgagacgccaatgcgagcttatcggcttatctcgcccctcgccgaccgtgagcatcacgctcaggctcatcaccagcaatgcgggggccaaagtgcccggcatcactgccacgaattgttcaagcattcgcgtcctttctctgttcaccttaggctcccctctctgaggggagctgtccgcgaagcggactgaggggagttttagaccgtcctaagaattatctccctaaagcggcgtaaagccccctctgacgagggggctttctgcttagtcaatcaccactggcgaggagtgtaatcccagttgtcgaaggtgacctcgatcggctcggtccagaagtggcccttgacgccggtctccgggtcaacgtgcagcatccaacccttggaggccggggattcgatggagagcttcagctggtaggtgccagccttgtcgagcttgacgttggcgccgtagtgcgggccatcggaagcgttcatctgcatgaaggtaccggaggtggcggtgccgccctcgacttccttgccggtggacttatcgatgatggtgtagttcacggtcagatccggcacgaagtcgcccttgccgtagccgagctcggtgcccttctggttggcatggatgtcggcctcgaggtggaaggaagcgtcagcagccttcaggcccatggaagacggctccatatcgatcggctggaagtacacagcgcccacggtcagcgggccggcgtcctgatcctgctcttcagcagtaccggacgggccaaccggaacctcttcgaaaccggcgccggaatcggaggaagaatcggaggaagaggagtcggaagactgggaggaggagtcagccttagtgtcggatgcggagttggtggaaccgcaggcagccatggacacggtcatggaaccggcgagcagcaggccgagcagagcggccagtttcttgttcttcatcattgttattccttttctctatctctggtgaattaggattcacgcttagataattgcaattattcagttatgagataagtgcggcgtgggctggaggaattggcatcgatccgaggccgtgccgcaagtctgtcagttgtctgcagttatgggaggaaacggacgagctagacgggctacgccttcacggccgggacctcgacagtagcctgcgccttcagcttgcgctgcttgatgaagccgaccacgaacagcgcgataaccgcaacggctgcgatggcctgcgccactaggcattcgacgtacgggtagaggccaagccaatcgttcgtcggcacaccgttcaggtagaaggcgggcagcaagtcgccctcgatcagcgagtggacgccgccgccggcgaacaccaccaccagcacagacatcagaatcgaagtgaccaggaagaacggaccaatcggaatcttcacggaggtgaagcggaagagcaggaagatgccgacaagcaccaccgcggcggtcagaccaccgatccacataccgcgagtatcgcggctcatcgtgtagatggactcgtagaagatcacggtttcagcgccttcacggaacacggcgaggaagctcagcatagccagcgagaccacggttttcaacgtcacgttgtcggcacttgcggcggcttcggcatcagccacagcagcctcggtcttcttgcgaatgtaacggttccacgcttccacgctggacttgttcagcatccagttactcgtccacagcagcatgcccatggcgatcagtgcgcaggtgccttccatgatctcctgaatcgggccggagccgccgaaggcgaacacgaagatcacagccaccaagccggcgccgagcagaccgacgagcacacccaagtaaatccacttgacgaagcgcttgttatcggacttgaccaagtaggcgacgatggctgcaaccaccagcagagcttcaagaccctcacggataagcacgaggaacgcctggccggaggagctggtgaccagcttggtgaaaccgtcttccttatcggcggcaccaccgtcaagaatgccggcgtccttgatcagcatggccttgaggtcgtcgatcagcttcttggtgtctttcagggatgcgccggcgttcatggacttgcggcacatcttgaactggtattccacctgcgagacgcggttgccgctgatggcgttcatcacgttcttttcgaagccgagcttctcgtaatactggtagtacgcgttgttcacgagcgtggcgcccttggcaccatcacccttttcgtaagctttgtatgcattgtcgagaatcggggtcatttcgttggccacgtcggtccatgaacgattgcccttgcccgggttcttctttttcttggcgtcgagctccttgcgctctttggccagctgcgcctgcagcgcttcggcgtacgccttcggcttggcgagatcggcgttggtgtcgagctgctgggccgtggcgtcaagatcggcggtcaacgcatcaatctgctgagccagttgatcgtcgttgctaggcgtgtaggaaagattctgaacgctttggaatgcctgctgttgggcgagctgcttgtccgcgccaatggtgtcgtgcacgaccgcggtgaagttggaggccacgtaaatcttgttgtacgcgcccatgaaatcggaggtggcgccagcggtgttgccatccttgtacgtcttaagaccgctgttcagctgcttgtccatcgccttggagacttcggcccaggtggcgtagtcaacgctggacgagcttgatgaactggacgagctggtgctgctgtcggcgaaggccatcggagccgtgactgcaggagccacagtggcgatgaccatggcgaacagaaatacaatcgcagccagaactcgcagctgcctcacgctggtgtgttcaacggaccgaagagcagcctgggcgcgacgaaccatgcctatccctctctctgcgcggctaagtaatcaaaaaccaactactcaatataaagaaaaacttttttgaggaacagtcttgattttttaggatttaagaggtattaggcactgtttttcgatcaattattaccgcagattgtctcaatattcgatattgtcccgctcacagatgggagacttcccgaattatgaactccccgcgactggccactccccatccctcatattgcatgaccaactgtttcaccaaggttcatagcctaaaatcactatgttgcatcacggcaagaggctggcaataattcacgcgatggcatgcgcatgttcattctggtttgcctcgggtttgctgacctgccttgagtcgcttttatttgcactggttcatcccccggtgagatcacctgttgcacacgccgcacgaacgacctgcacatcagcgcaggcactcattggtggtccttgtccacaaagcgacacgccgcagccggcactgaatgtgcatttatccgaaagctgtggtagcttattcgagttgcctacggagcttacttctagcaagcactgcagtgcatggaggattcgcctagtggtctatggcgcacgcttggaaagcgtgttggtgtaacagcctcacgagttcgaatctcgtatcctccgccatcagggttttggcttttgtcaaaacccttttgttatccgcacccacatgcatatacgcagcggtccaaatatgtgcacaatcgtgcacattcactgtttttgcagtggcgtggcatggcacatattccgagacgaccgaattcccacaattttcgtgccacaacagcgcataaaaacacgaaaatgcgattacgtggcacatccgaatgccacatgagcgcaaaatagccaatattgcgctcatgtgtacaacttagagcacccgaatacttcctcgtacacccgtcgatttgcgtaatacgcgattgcgtgtattgttgtgcaagccgttcaacggccctaagccgtgcgcacattatcgccccgatagctcagtggtagagcacttccttggtaaggaagaggtcgtgagtccaattctcactcggggctctcaatcaccactcgatgccgtactcggcatacatatacatatcgtactggtactcactgctgtagttcaggtcgttctgatgtgcttcatgatggctgttatctgactgcataatcattccttttcctagcctcatcggtattacagtcagatataacgtcagcatgtaaccggggcatgctcacccaacgaaccgagggtgaattcatggcgaactgttgcgccctatgcttgcggccagtgaggctgaactgcagcgactcaagcgcgacgatccggaactcgtcagcgagtaccaatccaccaaaggattcactgcgaattacgaatcattcgatgaccgcacatatttgcgattcatcgcctagcagcgacatcgcgtgcgtattccgatgtctgccgggtgactggagaacactgatacatacgaaagcggccggcgctaggcattgctgcccggcgccggccgagaggataaggattattccttatttattactgcttaggctataacctcgctttcacagttgctcgcgattgcgacggtaggcgatggcggcgccagcacctgccagcagcagtccagccagagcgatcgtggcgacatcggagcccgtgttggaaacaacgttgccatcacccttggcagcggtacgcttcaccaagccggcaattgccttctcgagagcctcgcgagctgcgtcgacctgcttctgcgtggcgttgctgttgtcggagacctcacgggccttcttcagcgcggcgcgcagagcgttggcggagtcgtcggtgtagagacccaggttgatggcggcggccttgttgatggtcgcgttcagagcagccttgtccaccacgcccggttccggattcggcttcggctcggcggtagcttccagcttggagatggcgtcctgaagagcgctcagtgcggtatccacatcctgctgggtggcgttcttgttgtcgagcacctgctgtgcagccttcagtgcctcggcgaaagcttcccacgagttggtcgtgtaatcggccttctcgagcttgcttgccttgttcactgcagtctgcaggtcggtcttgttcacctcaaccgggcctgggccaggctcctcaccggtcttctcgagaccagcgatagcggattcgaggttcgtcagcgccagagccacatcgtaagcggtggccttatcgttatccgccacggcctgtgcagcttcgcgggccttgaccagagcagtccagctttcagccgtgtagtcggattccttaagaccgttagccttggcgatggtgtcgttgaggtcggtcttgtccggagcgacagtctcttcctcaacctcgcggtccgtggtcaaacgcagttcggcagcggatgcgaacttgttggcctgggagtcgctctggcctgcggaagacaggacggtcaagcgtacggcggtcacattctcgacggcgtcgaagctggccttctgccacatggtggtggtggagaactcagcatcggtgacgacatccttggtggtgccatccgccagagtgagcgtgatcttgtagcccttgatcttgccgttggcgttcatacctccggaacgcggcaggtagcgcaggccgttgatggtggtcggtttgttgaggttgaactgataccatgcggtgccgttgccgactgcgttcttgctccagctggtgtgccagtgggtgctgtcgttgccatcctgtgccagaccggccgggccttcgctcggcaggcctgcggtaggctcttcgctgcccgtggccacggtgtagccacccagctcatcggagccgtcagctgccacgtcgtacttgtcgctgctctcgttgccgggagcggtcttcatgtactcgtcgagggccacgagaatgtcgtatgccttggtgaagtcctcagcggttgcgccattcttgttgatgagcacgcgagccttgaccaaggtgtcctgatactgctgccatgcggcatcggagagctcagcacgcttggaatcgtacttgccgcggatttccttgaccttgtcctgcgcttcggccttggtgcgggtctgggactcgatgcgctcgatcttcaggttgtcgagcacgaagtccttgtatccgccgaagtcctgtgcattgccggtggaaccctgcagatcaggtgcggttgcggtcgagtaaataccgaaccaggaatcgccgttgacgccaccggtcagctcgaactcggccttgccggtctcacccagagccttcttcaggttggtcagcttcacgctgccggcagagtattcaccctggcccacagcgatggcgtagatgtcatcggaaccggactggtagtcgaagctcaccttgtacttggcacccgcctcgaacttcacgttctgcgggatcgtctggtagaccagcgtgcccttctgggtcaggccgttaaccttcacagaccaagtgccatcgagcacatcgtccatcttcttgacatcccaaccggcctgcgtgaacggagcatgcagctcggagaggtggatgcggttgtcctcaacgccttcggaaccggagaccacgaacggccagatgccctgggcgttgttttcgaatccgttggtgagggacttcagcgtgccgtccttctcataggtgatgccggagtactggttctccacgatgcgcacatcgtcgaagtaggtgtgtgctccgtcggtgctcttgtgagacagggttaccgtggcatcgccgttctcaggcgcggtgaagaacacgtacatgttctggaagtagctggagccattttccgtattgctgttcgtgttgtggccgtatgccttgatgtagttcttggcgatggacttgccggtggagttggtggccagcaccttgccgccgctggttacggtgacggatgcatcgccggtggagcggttgtcgacgccaacatacagcgcgtacttctggccagccttgagatcggtcagacgctgggagacatcgaccttgccggtcaggcgcagcatggcgttgttgtcgccttcaacttcggccttgccggttccggcgacggtccagttgtcggtgagggtgttggagccgccgttgaagccggcgtctaccacatgcatgccttcgctccagttgacctggatctgcttggcttcgcccttgtacaccacgtacggggtttcggcatcagcggtaagcgtcaccttgccgccggagacggcaacggtctgctcgttggtcttgccctgatcggtgagctggtacacctttacgctggagaggttcttccagctgtccggcagcgtccaggtggtggtgccgcccttggtgttccagtggtagagcttctgctcggaatccttgaccagcttgccggtgaaggaatcccacatccacggcagcaggtaggactcgtcgccagtggcgctgccatcgcctgcggagaccacaccggatgcgaccttcacgccgttgaaggtgatggtgcgctggcggtaggctgcgctagaggtgtcgttggaaccacgggagactactacaacgttgccgttggaatccttcagggtaatctgctcgttgccgttgttcgtgttcgggtcggacacggcagcggcattgccattgtcggcggtcagcagcgggttgttgacccagcgggtcaccttgaagtgctggatgaacttagtggacacatcatgggtgtacaggttcttgatgtaggcggcatagtcgttgcggccctgccagccttcgaagtccttcatgttgtagccgccgagcagcggggcgttggcagcgccgccgtattgcgggtagtcgccaacccagctgtccttctggtggttgcgcaggaagcgcatcacttcggagttctcgcccttggaggtgtagccgccgtaggtcagatcagctgcccagtgctggaaggtggagtcgtactcgttgccggaaccccattcggtggtcatacgccagccgttgtcgttgatcatcttgctcatcttgcgggtttcccaagaatcttccgaaccggaagaagtcaggttgccccacacatcgaggtagatgaagtccatgttgtcgccgacttccttgctgaggtcagcgaaacggcttacacgagaaccggatgccagatcgtagatgccgtcgatgccgacaccctgatcaagccagttccagccgtagctcaggccgcctgcagagttgcggcgcaccatgtcctcgctgaaggccttggcttccggatacatttcggaggcgttgacgtgcacaccgaagcgagcgccatacttggagccctcttccatcatggtgttcatgtcgtcggcgccgccgagacgctggccgatatcgccgtagtccgggtggccggagtcgtggccttcattgccgtagcccttgagcagcacggactggccgaggccgtcggtgttcaaggccaccttcttgacgttgtcaagcgtggtgaggaacgggttctgcgcctgggagccgaagttcatggcgatacgccatgccaccagttcgggaacttcctcggacttgtacgggttgttcatgatgtcgcggtaggcgattgcgccatcctgccagttgacggcaccgtcttcgttctcgtcgccggcgatggccacggccatctgcggcagagcggtttcggccacggtgtacttcttgcccttggaatcggtgaccgtgcggtggtagtaccacggagcgctggccaggcccagggaggtggcgtcaccagtctgctgggtggtggcgtagacacgcgtgttctggctgccgccgcgcacaggagccgccacataggtgccatcgtgctcggagttgctccacaggccggcactcaggccagcaccggagatgaagccgtaggtgtagtcgctatcggtgacgttagtatcttcggtcactgcgaagttggtatcgccaggcttctgcgtgttggaagacatacgagcaccagtgaattgggcattttcctggctggaacgcacggaaacgagactctggttcgggaaggacagcgtctggatggcgttctcctccacaccgttgccctcaggaatgccttcggacaggttgttcttgatcttggtgacgttgaggtgcagctggttggccttgaccgtgatctgaacggtgatcaccgcgtcaatcttcttggcctcatccttgaccttcagcgtgtaggtggcttcggtatcggaaaccttcttgaaggtcacgtcatcgtcggtcagttcgatgttggtgccgttgatctcaacggtgcgcacatccttggtttggccgtacatcaccttgccgtcggtcatcgtgtactgcagcacagaggggaagttcttcttaatctgaacttccatcttctcggtcttcagcgtttcggaggcgacctgaacggttttgttcagggtgatgggatcgatggcaagatccgcgccggagaccgccacctgctgggagacgtcctcatagccttccttggcaatcgaaagcgtgtgttcgccttcttcaatgtcggcgaaggagaaggtgatctgcaccggtcttcaccttggtcttatccaaacgcactgttgcgccttcaatggcagcgccttcagcgtccacaaccttgccggaaaccgcgtgcttggcggcttcgacaacctccgggaagtccttgatgtacacgtcggtgacctggttcagccccttccaggagccggccttgatggcaagcttgttggagaggttcgtcattgcggagtaatcgacatcgaatgccgtctggccatccacggtcagtgtggcgaccttggcgtcggtccaggagacctgaatgtcgtgctcttcgttggcgctcggagcagcgatacgagcaccgctgtaccagctgccgctaccgccaccggtgtaggtctgccagaaccagccgtccgaatcgtagccgatgaacaggccgctgcccgggtcgttgtagcccaggtagaagccgaagcggttggcggagccttcctgcggggatttgatggtggcgtggaaggagccggccttggagaagtcgtaatctgtgccccatacggctactgccggccagttgttgctggagctggggttcgctgccgcattaccgttagaggcagtggacttgaggtgcagccaaccgtttgccatctccaggatttcgccgccctgagcgatgttggaatcaatagtccagccttcaaccgcatcggcttgtgcggaaggagtctcggaagcagttgcagaatcagaagtatcgttgatttgctgaatctgacttgccaaagtctgcaagtcagcatcagacaggggcactgcgaacgcagtacctcccccgctgcccatgcaggttaaggctaacgctgttgccagcgcagccgatatagtcttcttctttttcattaactatattttccttaatctcttcttcgaggtgaagcagatgccttcttcattgaagaatacgcattcgcaattacgataagacactttacaagaagctattcttaatagcaatctcagcaaatacggagaatcgccacatatttgacattgaattacaacgtgagtgaaatcacaaaacccaataaacgactacgttgttaaccttcacatctatattcgcatcatcgcgacacgcgcagggaaaaactgcgcaaaaaaagtaagacgaatttacctgcattcgacgcaatcaatgcagcagcattacagcagcaagccgattgagcaaaatagcaaaagccgccttgcgcaaccgcaagacggctttgacgacaatggtgaggctgtgctcgcttacttcttggaagcgttcacggcatccacagccttctgcagcgattgagtataagccttgtaccaatcagcctgctcgttgagcttcgcagtagcggacttgaagccggcagtgtcgtcagctacgcagccttcgtataccggcagttccacgctcagttccttgttgagggcgtccagcgtggaggcatcctttacatccttcttggtgagcgcagcagcttcggaagcatcgccattgaccaagttgttgtagtcattagtggcgttgcgcacattttcggaagcggcggcgcaagcggcgactgcattgttgtactgagcatcggagtaggcgcggaagccgaacacaccggccacgacgataatggccacgaccaccacggcgataatggcgacggccgccttagacatgtgcttcttctgagcgccttcattgcttgcattgttggcgttgtttgccggtacagcctgctgcccagcggacatacttcgatctccttcgttctcgtactttcatacacacgtatgcgctcttagcgctctcatgcgcactcatatgcagggaagtcgcttttcaagcggctacttccctgaaaacaaaaaaccctcgcattccgcgagggtcattggctgggatgcctggactcgaaccaagaatggctgaaccagaatcagctgtgttgccaattacaccacatcccaatttggcttggcgtagcaactccaaggagttgttcgtcgtacccccaaccggatttgaaccggtgttggcgccgtgagagggcgtagtcctagaccgctagacgatgggggcatattcagtttttcacccggctgctcggtgaaccgcgcaacgagtgataaatatacgcaagtattcacccttacgcaacttacggcgtgtcgcgcggaatttcaacgatttcaagtgctacgctgccactactgatgaatttgcatgaactctactgacggattatcagtaagcactactgatgaattaccatctaatgcactgatgaaattgcagatgaggcaatgatctttgccttgcacattcatagccggcaaatcagccttcaagaaccaaatgaggcgcttatgttcccttgcgacagcgagcgcgtcgcgatgcttgtaatgcaatgtcacgtcaaagaccgccgcccggttacctatcaaccgtttcatggacgcatgaaggcgaaaccacctacaaggcacgtttcgtgacctcactgcacaaaccagccatgttcaacctcgtacatattctcactggcatgcggcgcagcggtaagactttccagctgttccagctcatcactgaatacaagaaaaggtgggcatctgcacatgcagacgcccaccttgagtgtccttacagctcagccgagcacggaaggaaccttagctcacaggtgctcgcgcaggcccttcaggcgagcgagggaaaccggcttgccgacgatctccatggactcgaacagcggcgggctcacgcgacgaccagacatggccacacgcaccggaccgaaagcgaggcgcggcttgtagccgccctcctcaaccagagccttgttcagggtctcatgcaggttgtcggtcttccagtcagcctcatccacagcctcgagtgcggcgatggccttgtccagcacctcgccggcagaatccttcagctgcttcttggcgtcgtcagccggctccaagtagccctcggtggagagcagggagccgaccatgccggcaacctcacccagcaggcgcacgcgcggctgaaccagcggagcggcggcggtcagcacctcacgctcacggtcggtcagggcatcccagttgtcggcggaaaccacaccgtcgcggtgcaggtacggcaccgagcggcgcaggaagtcctcgggctcaagcatacggatgtgctcggcgttgatggagatggccttgtcgatgtcgaagcgggccgggttggccttgacgtcgcgcacgtcgaacttctcggtcatctcgtccatggagaacacgtcgcggtccggtgcaatggaccagccgagcagggccaggtagttgagcaggccctcgcggatgaagccattgtcgcggtggttgaacaggttggactctgggtcgcgcttggagagcttcttgttgccctggcccatcacgtacggcatgtggccgaacagcggcatctccttggcgatgccgagttccataaggtaacggtaaagcacgatctggcgcggggtggagctcaggaggtcctcgccgcgcagcacgacgttgacttccatcatcgcgtcgtcgaccgggttggtcagcgtgtacagtgggtcgccgttcgggcgcacgatcacgtagtccggcacggagccggccttgaactcgatggtgccacgaatcagatcgtcaaaggcgatgtcttcatcaggcatcttgatacgtagcgcaggcttgcggccctcggcgcggaaggcggccttctgttcatcggtcaggttgcggtcgtagccatcgtagccgaactcggccggacggccggcggcaaggttgcgctccttgatttcctcaggagtggagaaggactcgtaggcgtagccggcttcgagcagcttagcggcaacatccttgtagatggcggtacgctcggactggcggtacgggccgtgagggccacccacatcgatgccctcgtcccagtcgatacccagccaacgcagggattcgaggatctggttgtagctttcttcggagtcgcgcacggcgtcggtgtcttcgatacggaagatcagcgtgccgccggtggcgcgagcttccgcccagttgaacagggcggtacgaatcatgccgacatgcggggttccggtcggcgacgggcagaagcgaacacgaacgttcttgggcagttcgggtttggtgttttcagcatcagtcatagtcccctattgtgccgcgcgcgccggacgcggagagcagcgctcctcgctcttttgcttcgttattgatgtttcgggccaacaccatcccaaaacggccattttccaacgaaatctcttttgcctgccatttgcttttcttttaaaagcaaaatcaaaagaaaagaaaacagcaaacgagaatcagcaggccaggcccacgaacagcagatcccagtcttgagattcgtcttcatgcgattcgcgctgctcaacggcggcatccgtgtattcgtggttcatggcattccctacatctctgtatgttgctttatgcatagcgccaaaagcttcgtctgctttccagttccacccccgcaactgtgcgcaatattcatgcaacaggttacacaaccgatcgataacgttcaccctcaactgatatcgatttgataaccatcgattctttccagtgcattcaccacaactttggacattatttggcgcaattgttgagttttccactcatgcaatggaagaatatgatgtgacacataggtcttatgaaaggggaatcaatgtctgatcccaacaatgtgcctttgcctcagcagcctgaggccaacggtacgcccacacctaatcccgtaccgcagtatggcgcaccggccccggcgcagccctcacagccggcgcagcccgcttacggacagccggcatacggccagcctgctccgaccgcgaactcttatggccaggccgtaccaacctacggtcagcccgcgcccgacgccaacacctacggtcaatccgcaccggcgtacggcacaccgacccccgatggcaatccttacggcccggttccgccgtcttacggccaatacgccgcgcccactgccactgtgccgctggataagccttactacggatgctccttccaagaagccttcctgcgcttctggaagaagtacacggtgttcaagggccgcgcgtcccgcagtgaattctggtggtgggtgctggccgctttcggcatcaatatcgtgctggacatcctcaacaccgccacagatgaaaagcttggcttcctcgccaccatttggggtctggcgaccctaatccccaccctggcactttccgtccgccgtctgcatgacacgaacaagcctggctggtgggttgccattttctatatcgcgatggttatcggccttatcatcatgattatcggcggtggtgcggcactgtacggcgggttcaggagccttggcagttatgactatggttatggcagcatggccgccggcggtcttggcgcggcggtcattggtgcgttgattacgctggccggctgcgttgtctatatcgtgttcatggctcttcccagcaagccggagggcgcacgttttgacgatggcgcggcggcaacccccatgcctcagggtgcttacggcgcaccatacagcacgcctgtacccccgaatttcgccgctccgaacgcgcccgcacccggcttcaaccagccggccctggcttacgtccagccggccatgccgacccccgactatggccagccggctgcacccgcacctgattacggtcaggccccggccccacagtacggccaggttccgccgatgcctcaaaacgccggcgacgaatccgcaacaccttctgagcacacggctcccgccggcgacaatgcccagaaaccctggcaaggccagtaaccgatatcggggaacttccgttgaagaagttccccgcaaccaatgatgaagccctactcaacgcgagtagggcttcatcattctcggcactgtattctcggcactgtattcagccaactaccccaacggcatcacggcaatggactgcgaaagcatatacgattcaccaggactaagggcaacgatacggtctcggcacgccgctgcctccacggccacaaagccacgccattcacccgtcttggcatgggcaatggcgttgccgccctgctctccgggattccacaccaccgtctgcggcgagccggtcttgccgatgcgaatcacacgacccagcacatggtcctgcaattccagtgcagcatcggaataatacacacggtccaccggctgatcgccgaacatcaccgatggctgttcttgtagttttggcgggaatccggcttccgtggcatccagatatgttgcaccccgcaaaccgaccagccgcgcgccgagcacatcgccgacatgcagatacgagtgcagcgccgcctcatacgacatcggctcacctcccgtgttggtaacggtcagcgtcatcgtcagcgtatcgctggcacacacctcgtatgcggcatggaaacgcacgttgggttcatcctcgatccatggcacttcgccagtcgtcagtcgttcggaatccagcacataccgcacacgggcaccggtaaacgccccttcgtccagcgcccactggcgcaatcgtgcgaacccatgaatcggtcgcttcgcagtctgcccgccatgcacaaaccccggcccgaaccaggggaagcacaccggcactcccccgccaaccggctgaccagcttcgaaatgccatgtgcggggcgtccagattacatccggctgccccgccggggcccagcgcagcagatgcgccccgtaatcgctgattaccgcgctaccgccgtcattggtgagcgtgcgcagattgacgccattgcccataagtgtttcttcttccgttgcgtaagcgatgttcttcaccacatagacgatttccttggcacggaggaatcgcgagcaggggtaagagaaccgatcaggcgggctaagctgccttgattctcacaactccacggtttctttgccagggtcatctttaatgtgcgcaaacttggcggccaaggcctccttgttgcgcttttcgtcttcttccttggccttcttcttggcttcgtccgggttccagagcacatcgtcgcggtgcttggtccattcggcaccggccagcggggcaatgtattcggcggtggcggtcagggtgtcaccggcattggcacgcgtatcaatcagatcaagaatctgctggtcggtcaggcagatgcgcggaatcgagcactgctcacgtaattcgttgacgtacagcagaatcggcaacgttacgatggcggtggcccgggcctcgtcagcaacatcagcggcatcagcaacagccggaccaaccaagccaaccgtctcggcatgcccgctcaccacgttcagcagcgcatcgcatacggcgagcgcggtggcgaaacggacggccacatcagccggctcgccggaagccgccaaacgtccgccagcctcggcatcggcctcaacctgagcctccacggagacaaccgtctcacggactgcggcctcgacatgcgaatcccagtcaacacctaaagcttcggcggcatcgaaaatcagctgcacatcgccggattccgagtaaccggccatcgtatcgtaggcgtcattggcagcaagcagcgtgtctacgatgctttgcggacggccaggaatctcatcggccccctcgtagacgaattcggcgtcaggcatcgtaacatcctgaccggtgagaatgcgtgcgaacgcgtgcgtgacacgcacctgcaggttctccgcatacttggcgtcattgtccatctgcatggcttcggtcagcggccacaggctaattagcgccgagccggcttcagcggcctcagctacccccggcaatgccgcgatccgtgcgattgcctcacgattgagttcaatggtcattcatgctcctctgcgttcaccacttgattgtagtgcgtcccattggctccctctgaggggagcccagattgtagctcagctattcaccagtgtgccgttacttgacgttggctgctgggtcgacatacgtgattgacatcacacggccggtttcgttgtcgtacgtcaccgaggtcacggaggcgagcgccgtgtgccgcaggaacatccagtgctcggggtggccggtctccagataatggcgataactgaaaatcggcgattcgtggctgaccaccacaatctgttcgccggggtgttgggcgaccttctcgcgtgcgaaatcatccatgcgctgcgcaatgtgctgataggattcgccccaactcggcttgtacaggttggtgaccagtttccaattgccgttcttccacagcgcgccttcgccatggccgatacgcttgccgcggaactcgttgccggcctcaatcactcgctcatcggcggtgagcatgagcggggcttcgcctcgggcctcgcgcacgggattcaacgcgtcaagaatcgcgtcggcggtctcgcgcgtgcggtccaggggagacgaatacaccgcggaaatcgtattggtctgagggctattggccagataggcggcggtggcctgtgccatacgccggccaagatcggagagatggaagtcgggcagccgctcatagagcagatggtcagggttgtagaccttgccgtggcgaacgaagtggatggtggttgcgctcatgagccgcctttctttttattcctacgggcatcttgcgatgttcgccgaagaacatgagaacgttgtcttaatatctccaatctaccgcgtgtcgcgccctaaccaacgattagagtatccgtgacgcaaatatgcgaatagggaaatccaacgcaaactttgcgcgaccatggacaacacatcattcgatgagggcttcgccggcaacgccacgtcagcggggaacatccaatcgggagcggaaaggagcgtagtgctgttatgtccaacaacctgtccaactcgaacaccattatggctggcatcaaggaagtgggtcacaaagtttttggtgggtatgcggagttgctgcgcatacctcataccgctcgttattccatcggttcggtgattgcctgcatgccgttcccgatggtgggcatgaccatcaccatttccgtgcagcattactacggcaactactcgctggcaggtatgctcaccgccattcaggcgattgcactggccgtggccacgccgctgctcggcaagctgaccgacaagttcggccagcggcaggtttcgattccaacgattctggtgtggattgtcgccgccgtcgcgctgaccacatccatcaccaatcgtgcgccggaatgggtgctgtactgtttgacgccgttcctggcagctattccgccgtggggcgcgatgagccgcgcgcgctggaccaaaatcctgaagggcgatcaggagcgtaccaaccgtgcgctctccctgtgcggcgtgctggacgaatgcatgtgggtaatcggcaatccactggcttccacactggccgtgatctccggtctgctggcattctcgttcaccggcatgtgcgtggtggtgggcgcgctgatgttcttgaccgagctgaccactgagccaccgtcacagactcagctggcccgcgctgagggcatttcccgcaaggaataccgtgagcgcgaggcggctcgagccgaagcgttgaaggtggagaccgcagccgaggagactcgccgccgtcttgagcgcgaaggcgtgaccgatgaggccacgattaacgccgccattgagcaggcggtcgccgatgcgcgttccggcaagaaggcgtccatctggggaccgggtctgattgcggtatgcgtcacctggttcggcttgggcgcgttccagtcggctacaggcatctcgatcatcgcattcgccaccgagtcgaatatgaagcagtacacgggctttgtattcgcctgcttctccatcagctcgttgatgggcgccttggtgtacggcgcgaagaactggtcgattgccctgtggaagcgcttctacttctgcctggccgtggtgaacatcggcatcagcacgttcctgttcgccaagcatctgtgggtgattatgatcatctacctgatcatcggcgtgtgccaggctccgacgtggattaacggcaaccagctcatgctgcacttggtgccgccttcccgcctgaccgaaggcatggcgtggatgggtgcgatgaattctatcggctcctccgccggttcggcgattgccggccagttcatcgaccgcatgggctcgcatggcggcttcatggtggtgaccactttggcactggtctcgctggtgattgcgctgattggcttcaagcagatcaagggctccaccgagcagccgaccttgactgaagtgagtgtgtgagacaaaagctaagccccctctgacgagggggcttatacgtcaaaacgctacttcggccagcctttgggcgtgtgttccagggaccagatgccgagcttgtgggagaagctgttctgccacttggcttcaagctcctcggcattcagtcgattttcagcggacttcagacggttcatcgcattggtgtgcgtatcgtcgagcagccacttgcgaatcaagaagttccagatcattaccacggcagtggccaccaacttgccgatattggtgcgcaacagatattcggcatgctgcgatacataggcatcatggttcatgccataagtggaaatccagataatcgcgtcattcatgaacagaccgactacagcgcccgccacgaagataagaatctccatccagcgcgccatgtcatcacgatgcttgaatacgaatttcatgctcgccagatagttgaaaatcagcgagatgatgaaagagacggtggcagccagcacgttgtgcatgtggaatatgccaaccaataggttgagaataccccagtcgataacaaaggcgatgacgcccacaatgccgaacttcatcagttgttcaatcagttttctcacaagggtattcaacactattgggctgactgcggaacatatattggctggaaaggccaataatctccccaaattggccttgccccggtccgttctgcaagcagcttcctacatccgcatgccatgttcaacagcaaccgctgaggctagactggaagcgaaccgaatcaaggaggaattatgcccgttattcacactcatgtgtccgtgcccaccacccctgagcagcgcgaggcgttgaaggctgcctatggcaaggcgattaccgccgtgccgggcaagtccgagggctggctaatgtgcccgttcgaggacaatatgccgatttacttcggtggtagcgatgaccagcccgccgcctatgtggaagtcaacgtgttcggccgctctgtgccgggctctgcttgggaaaagctgaccgagagcattatggccgcgctgaactccacgctcggcattcccgaggaccgcacctacatccgttacaccgccaccaccgactggggctggaatggtggcaacttctagttgccaccattcccctcgcagcatagctgctcgcatcgcctacggaaagcccggtgggctttccgtttaacggctcagggtagcaacttctagtttgcgtatgctggctcccctcagtcagcttcgctgacagctcccctcaaagagggaagctcagatgtagaaagcccgccggtggcgggctttctacgtttcaaggggctgatttccaacattcagaagctctactagcgtttcaaggggcttttaaaacaagaaaaccggagtataaacattgcaatttcaatggtcatactccggatttcgcaatcgaagagcccctcgaaacgcagatagacctccggaaaaccgaaaatccgcccctcaaaagcgagttacctcacctcatgcctgtcatcacacgatcttgggcatgggggtggtgaggctggtggtcaggttgacgtggaccagaccggcaccggcatgcacctcgaccttcttcagggtcacggtgcgctcttcttcgggggcacggtcgttgtcggtcatggtcgccggggacttgaccgccacgaacgccagttcgtccagcgagatgcctgcgctctggcacagttccatggcctcggacacggactcggtgaagcccggcttgtaaatcacgcgctcggccggtacgccgtaggcgttctcggccacccacttggcgttctcggtcagggccatgcccttgtgcgagtacggttcggccggcatggagccgttctgcaacgcgtcgacgaaaccgtcaagctgcggggccagcgcctcgccgccgtcgcggaacaggttgccgatgatcggcgtgcggaagcccagctcgtcggcggtggccttcagggacggaacctgatcgtcctcgccttcccacaggttgatgagcgggaaggtcggaatgtccaggttctccaggcgctgcacgtggaacgggtagcgccaggccagctcgggatcgtcgcgccaggtggaggcacgggtcaccacgatggcggcggacggccactgcgcgccgtattcgcggcaggcgatgtccagccacttctgggcgccggcgtcggtgccgtagccggcctcgacgatgaccacgtcatgcagggcgcaggccatttccacggagaccagcgtcggaatgccgatggacacgttggcgaacgggccaccgtgcacgtagaccggtgatccgttcacggtttcggtcttggccggcttgaccgcgtcggccagaatgccagtgatacgccacaggtccacgaattcgccgaaggtcacggccttgccgtccttggtgccggcgatcatcttggacacgcgctcggaaatctcgtccatcgagcgggagagcaccacaatctgcatgagctcgcaggtcggcgtgagcacgaccttctccggcacgttgcccttgccgtagtccacagcggtggagcgcagggagcgactcggaacctcggagacacgcggcacgagaatcgtgtcgagcttgccgtcatcgatggccttctcggcgaaggagacgagcaggttctgggccgcctcgatggcgcccatttcgccgcacagaccccagtcgatgagctcggggtgggtcagggaagccttgccgccgccggaggcaccgcccttggaaccggctgcggtgatgcccatgctcggctgacgcagcacggcggtcgcatcaatgccgcgcttgttcagggcgtcgatcagggcgatggtcgtggtggtcttgccttctccgcgcgatgccttgagcggcgtatcggcggtgacgagcaccaccttgccgtgcttgcgcggggcgtcagggttctcggccaggtacttcatgtagccgaatgcgtcgatcttctggaccagaccgtactggctagtgaagtcttcgatggtggtcatataaagcctttctgtgtttgtgtggtggggcggggtggtggggcggcagtcgccgcctcttcgcctaaaaacagcccactgggctgttttcttaacggctcagcccctcaagggaggggagctcaatacggactaaaagtcggacatgtggaagccgttcttcatttccatgctgcgagtgtacagcacggagtcaagcagcttttcggtttcctccttgagctggtcggccatggtctggttggcggcggcgagaatctcgcgcacctcggggttacgcagcgcggcgatggtctcgtccggggtcatcggctgcacatcgccatccacgttgtcggcctcaaattcctcttcagcggcggactgcgcggcttcctcggcgcccgtcaagcccagacgggcgatctgctcgtcggtggcggcgaccaagcggtggcccatcgcaccggtcttctcctggtagcgctcaacggcgttggacgtggagcggaaggcgccatcgcacagggcggcgatgatgcggttggcccagtagaagttctcggacgtcacgcgggtggtggtgtcctcaaggtaggcgggcgtggtgtccacgttcgggaagaacggtaccagcgtgttgaacgggttggagccgtatgccatccactggatggcgcgggaggcctgcgggcggtacgggcggatctgcatcaccgcgagctggctctggcggttgatgccgatcgtgcggtacatgtggcgggtgcgctcatcgcccagctggccgtacggatcgaacggggtgccctggtagtgggagctcagcacgtacttgatatcctcgatggtcaccttgcgctcaggctgacgggcccacgggatgtcgtcggaggtgggcttgtggtcggcgtccgggccgtcccacacctcgtcgtacgggttgaggaaacgctgcatgtaccaggcgcgcggggtgttgtacacgtggtcggagtcggagtgggagccgaaggcatcgcgcgggttgaacggggtagtgttctccaccgcgaggtccaaatggttggtttcgatgaattcggcaaggtcttcggaacacatgtgcgcttcctggtcacccagagcgtcctcaaggtcgaattcgtcgataccgagctggttcggcatggtcacgtagacctcgtccggcacgcgcttggcaatccagtgatggccgcccacagtttccagccaccagatttcgttggagtcggagaaggcgacgccattcatctcgtaggtgccgaattcctcaagcagcacgccgaggcgctggacgccctcgcgtgcggtcttgacatacggcagcacgatggtcaggaagtcctcttcgccgatgccgccgggcacctcgggctcatcgcccttggccggcgtgtattccacgaacgggtcggcgccgagcacgcgctcgttggtggtcagggtttcggtggcgctcatcgccacgttcgcctcgttgacgccggcctcgccccaaataccttccttgaggtccgcgttcggcacggcggtgtactgcagcgggtcgtccggcagggtgatggttaggtgggagatcaccgacttgtattcgcgcggctgttcctccggcttcacgacgatgaagcgcttcgggttgaactcgccgttcgcggaatcctcgttgcgggcgatgatggtcgagccgtcatagctcgcgtctttgcctaccagaatcgtggtgcaggccatagtgtgatggtgtcctttctttgttgtagtcacgctcccactggcgggagctggacgacgaagtcggactgaaggtggttttgtactgacccacccccagtcagtgatgctgacagcccccgcctgcgggggctcatgtggctcacgccttgccggtcaggaagatgccgtcggtgtcgggcacttcaccgctgttgcgcagcgcgtgcaacagctcgttgagccagaagccctgattcaagccgggcaacggcttcttggtggcccacacctgcaggtagtactcatgatccttgtccggcggctgcggaccgttgtaccgcatgatcaccgccgggtcagcgctgcggcccaagaacttggaggccgaggagttgcgcccctgcacggtctcgggaatcatggccggcagctgacgggagaagtccggcgggatggccaacgcatgtgaatcattgaagtcgtacatcagcgcatcaatcggcagattggccacggaccagtgaatccactcgaagccgcagaccggaatcgaatccgggtccacgaactcccagtgcaggtagcgggcctcgggatccacatcatcgatgtagaacgggaaggagaccacaggcacgccaccattgaaatattcaggggccgcggccttggcgaaatcgtccgggatgacggtgaaatcggcggaaatcttcatacgtcccagtatcgctcatatgtgtgacgtactgggggctgtgcgttacggggtctctcccccagtctcgctacgctcgacagcccccactcatcagaggggggctagttgcgtcgggttatgggatcagggcgcagaagagggactcgaataccagtagcgggttgccgttgccggctaggcgcttgcgggcgtgggccacttcgtccagacaggtcacggcaccggcccggttcaaccgcaccgacaattcggtgatcgacgagcggttctccaggttgatgaggcccaccgaatcctccgcattgttctgcagcaccgccacatctcggtagatggaggcgatggagttcagcgcacgatccaatacgtcgcgcgtacggcgggtgaccaaacgcttcacatcgtctttcttggcaatctggttgaatgcgccacgcagtttcggcgggatgcggtcgctcggtgccagtccgttgatgcggcggaattccgcttcctggccggcggtgatgcggttcgcgtccgcctcggcctgggccttggcattgtcgataagattgccggccaacaacactgcatccgaggcacgggccagattcagcacaccgaccacaagttcatcgcggtcggacataacccgttcgtcggtggcgtacaacttggcgatgccgatatggccttcggcgagtcgggccgcacgctgcgccacttttggctcgacattggtggtggaggtcaggaatccggccaccgcctgggtggagggcacggcgaggttcacgatgcgtgtgcgcgagcggatggtgggcagcacgtcctgggcgctgggcgcgcacagtagccagatgcaatgctcggccggctcctcaatctctttcaagagcacgttggtggtgcgctcaagcatgcgatccacgtcttcgatgatgatgatgcgccacggcgcggtggcgggcatctgctcggaggtagtgatgatctcacgcacctgatcgataccaatagtcaccttgttcgtggtcagcaccgtgacatccggatgcgtgccggcaagcacctgctgggtgacgcgcgtgggctcagcgctcatgccgtgatccgggctttccagcgccgccgcgaatgctcgggccatgttggaacggcccgatccgggaggtccacagatcagccacgactgggtgatctggctcgggtcgccctgcgcgatacgactgagcatgtcgattaccggcttttggccgactagtgaatcccatacgctcatgcgagctccttgatgtcggattcgatggcagcccataccgcttcaatgctctggctcgcatcgataacgcggaaacgattcggctcggcggcggccaagtccaagaaggcctggcgggtgcgggactggaagtcatcaccggccgattccatacggtcttccgcgtgttcgaggcgatggtgggacagggctgggtccatatccagcaaatacgtgcggtcgggcagcaggttgttggtggcccacatgcttaaggatcgaatctcttctggcgtgagttcgcggccaccggcctgataggccaaggaagagtctaaatagcggtcggtgatcaccacttcaccgcgctccaatgccgggcggatggtttcggcaacgtgctgggctcggtctgcagcgaatagcagcgcctcggcgcgcggtgcgatgtcgacggcgcccccatccacaccgtgcaacagcagttggcgaatggccttgcctaacgcagtgcctcccggctcacgggtaacgaccacggtacgcccctgagcctcaagatacgcatgcagccgctcgacttgcgtggtcttgcccacgccatcgacaccttcaaacgaaacaaacagaccgctcatgctattgaccttagcgttaggcgcagagttgcgcccaacaggcagttaaaccagctctacctccgtttcaaggggctgatttggtcttttctgaaggtctacttccgtttcgaggggctgttgcccaagtagacaacgttccaaaacggcggaatgacgttggcgcggagccgttcatactcgtggttcagcagatgaccagccccttgaagcggaagtagatattctcaaaacgagaaatcagccccttgaaacgcaagtagagcaataattccgctcagccacgcttgggaattacggcggggcgctcgtagccctcgttggcggtcagccagtcgacgtcctttttcacagtggcgggggtggaaccgagtttttcggcgatgcgctggttggaccagcccttgttcgccaacttcttgacttcggcacggcgttcggcgcgcttggcctcctgcgccgaaaccgcagccgaggtaccgcccttcttgcccttgccggcaacggccttggcgccaccagcacgcccagcaccgcgacggccacgggtggagggaccagccgcacgcttttcggcgagcagtcggaaggcgtcatcaggggtgatggattcaggcgtgtactgacgcggcaccgtgcggttggtctcgccatcggtgatgtacgcgccgaaacggccgtccttgatggtcacgttcttgccggtgttcgggtccttgcccaaatcacgcagcggcggcttggcggcaccacggccacgcccgcggccgtacttgggctgcgagaacagttctttggccttgtcgatatcgaccgtgaagatctcgtcttccgaggccagcgagcgggtctccgacttgccgtcggcacccgtcttggtcaggtaggggccgtagcgaccgttgttggcggccaccgtgcattcggatacctcgccggtttcggcgttggtttcctcgtatgtgcccacttcgcgcggcaggctcagcagctttagcgcgtcttccagcgacagcgattcagggctcatcgtcttgaacaacgaggccatcttcgggcgcgacgcggcggcggccgcggccttcttcgaacccttcttggccgcagaagcaccagcagtatcgccagcagcgccagccgaagcctcagccggcggcaccaacgccacatacgggccgaaacgcccattgcgcacctcgacggtaccgccggataccggatcaacgcccagctcgcgcggtccaccggagtggttgtcgatcaaatcgcgggccacggccaccgtcagctcatccggcgcgatggtgtccggcagagacgcgcgcttcgggttgccttcggcgtccagatgctccatgtcttccagatacgggccgtaacggccgacgcgcacgtgcaggccgtcgccgatgtcgatggtgttgatggcgcgcgcgtcgatctcgccgagctgcgcgacctgctgttgcaggccttcgtgcgcctcgtcggcgttgcgggcggcgccctcgccggaaccgaagtagaagtgggtgagccagtcgcggccggattcctcgccgtgggcgatgcggtcaaggccgttttccatctcggcggtgaactggtagtcgaccagcttggggaagttcgtctcgagcaacttggtcacggagaaggcgagccagctggggatcagcgcacggccacgctcgtatacgtaaccgcgatccatgattgtggagataatgctcgcgtaagtggacgggcgaccgatctccttggcttccagcgtcttgaccagcgtggcctcggtgtagcgggccggcggctgggtttcatggccgtccggttcgatgtcgcttgcctcgacctgctggccgacgctcatcggcggcagggaggtgttggattcggaggcgtcacccctgacggccttggcgtccgtcttgccggcggcagcagcctggtccgagccagccccagcgccgggagcggcggccttgggcttgcgcccctcccccgtggccttcataaagccggggaattcgatgacggtgccggacgcctggaacacggcctcgccctcggtggggccggccggcgcagacaggcgcacggtggcggtggaaccggtggcgtcagccatctggcaggcaagcgtgcgctgccagatcagcgtgtataggcgcagctggtcgccgggaagtttggaagccagctcgtccgggtcgtggaagcgcgagcccgccgggcgaatacactcgtgggcttcctgcgcgccagcggttttggtggcgtactgcttgggctcggcggagaggaacttgtcgccgaaatggtaggagacggcgttgcgggcggcggtgatgccctcctgcgacagcgtcaccgaatcggttcgcatataggtgatgtagccgttctcgtacaggctttgggccgcgcgcatcacggcgcgagcacccatgccgaggcgattgccggcggtctgctgcagggtcgaggtggtgaacggcggctgcgggcggcggcggtacggcttggtttccatcgacatcacagtgaaatcggcggtcttcagcgccgaagccacggcggtggcaccagcctcatcaagctggcgaacgttcgccgcgaacccgtccggggtcagctggccgtcggcaccgaaatccttggagccggcgagtcgcttgccgccgagcgcgatcatgcgggcggagaattcggcacgctcccccagcgcgtcaggcgcggacagcgtggcgacgatatcccagtacggcgcgcgcttgaacgccatgcgttcgcgctcgcgttccacgatcaggcgggtggccacggactgcacgcggccggcggacaggcctgggcccaccttgcgccacagcaccggcgacagctcatagccgtacagacggtcgaggatgcggcgggtctcctgtgcgtcgaccatattgccatccacatcgcgcgtgttgttcagggaggcgttgatggcgttcttggtgatctcgtggaacaccatgcgcttgaccggcacctcgggtttcaaggtctgcaccaagtgccacgcgatggcctcgccctcgcgatcctcatcagtcgccagatagagttcatcggcgttcttcagggccgatttgagttcgctgaccgtacgcttcttgtcgccgtcgacaatgtaatacggcttgaacccgtcgttgacgtccacgccgaacttgccgaacttggccttgtctgccgcgggcacctggctgggctgcgcgaggtctcggatatggccgaccgacgccatgacggtgtaccccttgcccaggtagtcaccgatcttgtgggccttggtcggagactccacaatcaccagtttggtagccatacccactccttatgtattgcgcgaaacacacgacgtttctggcgtcataatactcatgaatcatgtccaactgccaaattccgccgttgtgccgggcaaattcggccgttcgcaccccatgttttaccgtttgggcggtgccggcggagcgccgatcagacccagccggcttaagggcgctgcagtgatctgacgcagggccagcaacagtccgaatgcgagcatggccacacccgcaatgcccacaacagcgctgacattcgccccctgaaccgcccagctggcgctgacattgagccccggcaccacctgccagatcacataaccgctgtaggcgagcaacagcaggcccccggtaatcagcacgctgccgacgatttgcacgctcactgaggagacgcggcgacccggctcgtccatgccggacttgcgcgtaactgccagagcgagcagggccaatcccgccaccagcaggatggacatcgccacatccgaagggcgatgccattgtccgtatatcacggagacaccgacggtcaccgcccaaaccacgccgatgacgcccgccaaagctcgaaccgcacgaggcacggtaagcagcagaatcaccgcacaggctgcggccagcatcgtgtgaccggaaggcgcggaattagcggcaggagattcagtgttgatgatgaacggacgcggcaacagacccttgatacgggtgacggccaagcagaccacggcgaacacggcgatttgcccggccaaccaccagcggcgtcgaatcagcgccgtaataatgccgattgcggcaattgtgcagctgacagcgataaccagccaggattgtgcgacggcgttcatcacgccggtggcccaggacggtacatcgttgtgcaggtttttccagaccagttcgtcgtacgattgtccgttttcggtaaacacgcacccccaccacacgccgaagccgatagcgatcaggagcagaccgaataccacgcacagtacgcggctggagattcgcgggcgcacggtaagcgggtcaagccgggccaagccacggtcgatatcagatgccccatccgcatcgtccatgtccagcggcctgaaatcccgtaaggagcctgatgtggatgccgatgcatctgaaccggagaccgggccgagcgcagccaatgggtcaacaacgttcgacgacgagtcaggctgcgctgcgcctgagccgaccagattgaccgccgcatgcgggtcgcgaattctaggggtctgtgcgtcattcatacgttcgactgtacggccgcgccccggacaggggaccacgctagtgccagctcacagccaaatccgcacataaagaaaacctccacacacccgtcagaggccacttacccttgctgcattcctgccctgggggagttgggtgacatagcgccgcgtggaggctggggataagtctatggagacgtatggaccagcgcagcgacacgaaacgtgcgcgccgggtcgcacggcagaccaaccagcgcattcaggcaatattcatgcaacatcaagaagcgtgcccaattgtaagaattccggaaaaaataccggcataaatgcgtgtggttacgctcacgtcaaacgattgttcaaggccaacagttacggtggacaccatggcttcttatactcgtcgtgcacattcgggaggcaatggccccgctctgaggcaaccgcgcaccgcgcaaagcagagccggccactccgcacaggagggcccctatacgccccaggagagccgttcccgccacgcaagccacaaggcttccaatagccatcgagccccgaacaggaagaaaaagaacacaggaaaaggcaagcaccgtgtactgaaatgggtgctgggcatcttcttctccctgattggactgggcttgctggccggtatcgcagtattcgcatacctgtacaccaccaccgaggtcccgcaacccgagaagttcgcgttggccgagaaaaccaccgtgtattacgcggacggcaccaccgcgatcggctcctacgcggagcagaatcgtgaaatcatctcttgcgaggggctgccggactacatcggcaacgcgattgtggcgtccgaaaaccgtacgttctacacggataaaggccttgatctgaagggcatcgcccgcgcattcattaataatgtgaccaagggcacgcgccaaggtggttccaccatcactcagcagtatgccgagcggtattacatgggcgaaaccacatcctatgtgggcaaggcgcgcgaggccatcatggccatcaaaatcgcgcagaccgaatccaaggacgaggtgctgtgcaattacatgaacaccatctatctgggccgcaactcctacggtatccaggcagcggccaaggcatacttcaataaggacgccaaggatctgacgctgtctgaggcggcgatgatcgccggcattattccgtcaccgtccacgtgggatccggccgataacgccgatatggccaaatcgcgcttcaagcgtgtgctgaacatcatgcaggaggatggttacatcactgccaagcagcacactgatgccaagttcccgcagaccgccgcggtggcgcagcagaacgaatacgcggggccgaacggttatctgctggatatggtgcgccgcgagctggtgcagtccaaggcctttaccaaagaggatttggatactggcggatacaagatcatcaccaccatcgacaagagcaagcaggatcttatgcagtccatcggcgacacccgtctggacgacatgcccgaatccctgcaaatcggcggcatagcgctggacccgaagaccggtgaagtattgtccgtatacgccggttcagattatctgtccaagcagctcaacaatgccgatcaggccgtattcgaaccgggttcgactatgaagccgttcgctttgctgggggccgcgcaatccggcgtcagcttcgatacattgttcaacggcaattcccaccagcacttcaccggcttggatcaagaggtgaacaacgctctggagaacaactggggcaacatcaatctgtatcaggccaccgccaactcggtgaacacggtgttcatgaacgtcaatgagcatctgacgccgaagcgcacggccgcaatcgcccatgaagcgggcattcagggcgatatcgatgaaaactccatgtacaacgtgctgggcatcaacgccctgaccgtgtgggatttggcgcaaggccattcgaccatcgccaacaatggcgtgaagaacaccttgcacatggtgtccaaagtgcttgattccaacaataaggacatgtacaacgcgcccagcaacggcaccaaggtgttcgatgccaacgactgcgctttggtacagaaggccatgcagggcaccaccacgtacggtacggcggccggcacatccagcatgttgggccggcccgtcgccggcaagtccggtaccgccaacgacgaaatggcttcgtcgttcgtgggatacacccccagcatgatgaatgtgtgggctatctggaatccggacgataagggcaatccgcaagtggtgccagccttctccggatacggcgtctcttccactggataccccgcccacctgttccaggagttcatggctcaggccttgcaaggcaccgaggcggagcagttcccgaccgctaaagacaacggcaagatcggcggctccgacggcacttggggcttgggcaagggacagagcaacggcctgtccaacaacaccaacaagcagtccaccgaagacgcgcagaagcaggctgagcaggacgcacagcagaaggcggccgaagaggaagccaagaagcaacagcaggctcaggagttcgcccagcagtgcctcgccaatccgagctattccaccgagtgcccgaattatcccggcaccactaccggcggagatggcaacgccggcaacaataccggcggtgacaacgggaacaataccggcaacgataatggtaattccggaggcaccggcgggaacaccggcaccaacggcgtcactcagtagtaagtaaaacacagacaacaaggctccctctgatgcaatcagagggagccttgtttttgttctgttagcgctcagcgcttgcgctgggaacggttgatggcggagataatcgacttcagggcgctagtggtaatcgacgaatcgatgccgacgccccacacgatctgcgcgtcatcggcctcgccgacctggcattccacgtacgaggcggccatggcgtcggtgccgacggacatggtgtgctccgcgtaatccataatcgaggcgtcaacgccaaagttggaaatggcgttgaggaaagcggcgatcggaccgttgccgatgccggagacctcgcgctccacgggcgcatcgaccccgacgttcacgccgcggtcgagcagacgagccttgagcacggtgtcggagccatcctcaccggagctgacggccaccttgagcagcttcaagcggccccacggcacgagcgaggcgtcatgagtatcgcccacaaccacaccggcggcggtcatgccggactgttcgaccggcaggtactcgtccttgaacagacgccagatatcctcgtccttgacttccttcttggtcgtgtcagcgtagttctgcacgatcttgtcgaattcgatctgcagacgcttgggcaggtcaagattgtggttggtcttgagcaggtaggccatgccgcccttgccggactgcgagttgacgcgaatgatggcttcgtacgtacggccgatgtccttcgggtcgatcggcaggtacggcacaagccacacgaagctgtcgagatcggcgccagcacgctcggcggccacctgacgagcctcgagacccttcttgatggcgtcctgatgcgagccggagaacgcagtgaacacgaagttgccggcgtacgggtgacgctcggaaatcttgatctggttgcagtactcaaccgtcttgcgaatctcgggcacgttggacaggtcaagctgcgggtcgatgccttgggtgagccagttgaggcccagcgtgaccaagtcgacgttgccggtacgctcgccgttgcccagcaggcagccttccacgcggtcggcgccggccagcacggccagctcggtggcggccacgcccatgccttcgtcgttgtgcgggtggagggagagcaccacggagtcacggtcgtcgaggtgggtggagacgtactccacttcgtcggcgaacacgttcggcgtggtcatttccacggtggcgggcaggttgatgatcatcgggtgctcgggagtcggcttgataacaccgatcacggcgttgcacacctcgacggcgtactccggctcggtgccggtgaaggattccggcgagtactcgtagtacaggtcgatgcccttggcctcgttctcgaggtccttgcacagttcggcggcgtcggtggcgagcttcttgatctcctccttgttcttgcggaacacgacctcgcgctgcaacacagacacggagttgtagaagtgcacgatggcgcgcttggcacccttgagcgcctcgtaagtgcggcggatgaggtgctcgcggcactgggtgagtaccacgatggtcacgtcgtccggaatcagctcacgctcgatgagcatacggatgaagtcgaaatcggtctcggaagcggacgggaagcccacctcgatctccttgaatcccatggagacgagcaggttccagaaacgcagcttgcgctcggaatccatcgggttgacgagggcctgattgccgtcgcgaagatcgacggagcaccagcgcggcgcgcgctgcagtcgcttgcccggccacgtacgctccgggtaatcaaacgggatctgcttgtcgtaggcggcgtacttgttgtacggcatacgactcggcttctgcggatcgccaatgaatcgcgccggaggcagcagcgggtcgttgttccccccattggacgctgcggctaccgctgcgagatcaaaaacggatgattgatcctgacccattgttcctcctttactgtgtgaaccattcatacaatcgcttattggatattcgtttacgcattggtaacatgcataacttcctctatcctagcgacggcccattccaacatcccgttcatctcacaatacgccagcacacttagcgttccgacgcagcactactacttacagctatgcgtgggggcgcatgggcgacgtcctcgcgttcttcgactgggagcacagcgcgaacgggcccaccgaggccatcaacggaaggctcgagaccctcaggggcatagccctgggattccgcaaacctcgacaactacatcaccagaagcctgctgcacgccggcggcttcagacacgccatccaaacccacctctgacacatgcccctacacgccaaaatcggaagagcccgataacctgctatacgacgaggatgccacctattccgcattcaggccgtatcagcagaattgatgtattgaccggttttatggtcgtcaccgcttcttcaccaacgagcggatgacggccataaaaccgaggctcatggcaccggacagcactgcgaatacctgcgggcgacgcaattcgttacgcatgctgatggcaccggtcacgcagtggtcctcgaaccagacgcgcacctcgttgctggagtatcggcccaccagatcaccccaggtgagcatgcgggtcacgtagccggccgggttgctttcatggaattcgaacaggcggatgccgcgatagcgcgacttgggaccatagcattcgaatccgcaggtaggcgcgtagcccaaatcaatgccatgcgcgtggcccacgaaggcgttcttgtgatcgtgaccgcagaacagcgcgaagtagccgcctgcctcacgcaaggcgtccacttcaccgacgttctcgtccgcacagccaatcgcctcacccagccgcgatcccggccggcaaatctcatggttgagcacgtagcaatggccggcgtgggtacgtgcgccttccaccgcgttcggcgtccatgcgggaacctctttgaggcaatcgtagaattcctgcggcggaatgtgctggaaggcgatggcaggcaccggcttaccgtcgccgttgcgttcgccaagttcggactgtacggctcccagccaatcgatcgcctcggggcttggcgtgccatacccatcggaatcagccaaatcaagaccgcgcggattgaccacataggccgggtattgggcgtcgttctcttcaggcttgccggcgtaatcgccggaattcaccatcatgacggacatagctacgcgcccggatccgtcggaagcctcaatgggcagggcaaaagtgcctggctcgaggctgtcgaccgggttcaggcagccggggaattcgcggtagatgccgtcctgctcgtcggccaggatgccgcactggaaatcgtgattgccgtaggtggcggcgaacggcacttccgcttcgatgaccgggccaaggaagccggcaaacgtgcggcggactttgtcacgggtctcgtccatgagctcgtccaaagtcgtcggcacatcctgtggatcggatgttgtggagtagaccagcgtggacgtggtggacgcggtggacgcggtttgttgggcgtcgggattgctgccgtcagacttcatggccagcagacgattgttcacgcggtttctggcccgccgcttgattccgcgcagcttggcctcgacttcggtgaccgcacgcacgcgagcgcccggttcctcgccacggcgacgcaggaaagtgtcgatgtaggcaggatcgtaaccgcgaatctggtcgccggtgaacaccaccagatccgggtcggctttgcgaatggcctcacggataagacggatggtatcggggagcacgttggggccgtcttggatgtcggccatctgcagcacgcggaagctgccgtcttcgcggaatcgcaggttcgtcatgcctcaccagtctagggacgtaatgctgtttcgcacagcatacgcgccggtccttcacgttccccgccgctccgcacggcagctgaatcactacgagaaatcgtagaacgtgtatcccttatccgctccgctcgtcacgttgagcaatgctttgccgttcagcgtatcgacgtcgtttcctatgagatagccgtctcccgtggctcccatatccgagtcgtggtaggagccggagaaggtgccatccttattgactttcattacggttccccatgcgccgacaacgggcggtcgccatccaccttgccgaccttgtcttttgaggagaatcgctttaacggaacagactcaccccgcgacgggccgtgcaatacgcgttgcccagccaagtatggcgggaattgggccagacggctcccagtcgcggtgcgttctggctcatccagatgctcggcacgcgtccgtctgcggagcgtgagccgagcagattgaagccgttcttttccagcagccactccgggtgctgggtggcgatggccaagccttcctcgagggtgagcggcaggcgctcatcggagtcaataagtttgcgggccacatccggctcgcgattgacatagcacgtgccggtgtgcggattgacgaccagatagaacgggccttccggcggcatgaagccgtcttgaggcaggaagctggcgatgtcacgcggcggcatggtggtgaagcctgccatgcgattgatggaggttcgtgcaatcagcgactcaggcgaaaccagttcacgcgtgggcaccagcaggatgttcgatcccaaatcggaatgctcgagcgccccgatcagaggtcgggccagcgagcggaatgcggcggcggaaatatccgccacatccgggtagccgagagccacgatacggtcgagctgtttttgggcctctactgatgcgatagacatggctaccagtgtagaacatcgccttcgcttcattgggcagccaccatctgggaagaccactgccgttgttccgcgtgtttcgtacaattgcattgttttacggccacccgcatgacggccgtccgacgtaagtaatccatcgaaacccagaggtcatagaggtcatcatgtccgaaaaattgaaggtcggcatccttggtgccaccggtatggtcggtcagcgttttatcacgctgcttgagaatcacccgtggttcgaggtggtcacgcttgccgcttccgcgcacagcgccggcaagacgtatgccgaggctgtcggcgaccgttggaagatggaaaccccgatgcccgaatatgtcaagaacatggtggtcgtcgatggcgacgatgccgagtccgtggcctctggcgttgatttcatgttctctgcggtaaacatgccgaaggaccagattcgcgccattgaagagcgttatgccaagaccgagaccccggtggtctccaacaacagcgcccaccgctggaccccggacgtgccgatggtggtgccggagatcaacccggagcacttcgaggtgatcgagcaccagcgcaagcgcctgggcaccactcgtggttttatcgccgtcaagccgaactgctcgattcaggcctacacgccggcgctggccgcgtggaaggaattcgagccgcgcgaggtggttgtgagcacctaccaggcgatttccggcgcgggcaagaccttcaaggactggcccgagatggtgggcaacatcatcccgttcatctccggtgaggaagcaaagtctgagaaggaaccgctcaaggtgttcggccatgtggacgccgccaagggcgagatcgtgccgttcgacggcgacctcaagatcacttcccagtgcatccgcgtgcccgtgctcaacggccacaccgccaccgtgttcctgaacttcggcaagaaggccaccaaggaagagctcatcgaccgtctggtgaactacacgtccaaggcttccgagctggagctgccgcacgcaccgaagcacttcatccagtacctcaccgaggatgaccgcccgcaggtcaagctcgacgtggactacgagggtggcatgggcgtttccatcggccgtctgcgtgaggattccatcttcgattggaagttcgtgggtctggcccacaacaccctgcgtggtgcagccggcggtgcccttgaatgcgccgaaatgctcaaggctctcggctacatcaccaagaagtagttgaaactgagtccgaaactgagaaagccctccgcaaggagggctttcgtcgtatataccgcaaaaacgcggctcagtggctcagcggccagtaccgccgtacaccacggcttcgatttgatcggcatcgagaccgtatgcggtgtgcagcgccttgacggcgtcgttgagctgatcgagcggcacgagcgcggcgatacgaatctcggaggtagaaatcatcagcacgttgatgccctcatcgctcagggcctggaagaacttggcggccagaccggcatgggtcttcatgccaacgcccaccacggccaccttgcctacgttggtgtccacatcgaaggagtggtagcccagcacttcctgcttgtcgagcagtgtgttctgaacctgcttgacggccgattcgggcacggtgaaggagatgtccgcagtgccgacggatgcgccggcctgcacgatcatgtccacgttcacgccggcggtggccagctcggtgaacaccttggcggccatacccggctcgttcggcacgccacgcacggtggccagcgcctcggaacgatcgtgggcaatgccggaaatcaccggtgcctcggggcccaggtcagggaacaggtcgcccatggatttcgcttcttcttcagtcatgtcttgccttgtcttgcttgaaattacttacgattatcgttcgctgtagccgcgctcagtcgaggttcggcagcgtacgcgggtcaatgccgtcgggcaccaccaatgtgccggggcgacgggagaacgaggaacgcacgtgcagcggcatgttgaaacgctgagcgtattccacacagcgcagtgccagcaccttggagccgcaggacgccatctccagaatggactcgtaatcgatggacggaatgcggcgggcggaaggcacgatacgcgggtcggcggtgaagatgccgtccacgtcagtgtagatctcgcagatatcggcaccgagcgccacggcaagcgccactgcggaggtatccgaaccaccgcggccgagcgtggtggcgtcacccttggcgttgatgccctggaagccggcaacgatggcgatgtctcccaatgagagcgcgttcttcacgcggtccggtctcacggccttgatgtgggccgcgccgtaacgggcgtcggtgaagaagccggcctgctgaccggtgaaggagtgggcacggctgccttcggcgtgaatggccatggccagcaggctcatggaaattcgctcgcctgcggtcatcagcatgtccatctcgcgctcgggcgggttggagtcgatgctcagcgcctgatcgataaggtcatcggtggtgtcgcccatggcggagaccaccacggccaccttgttgcccttcttttccgtctcaacaacgcgcttggccacacgtttgatcgattcggtatcggcgaccgacgaaccgccgtacttctgcacgatgagagccactgctgtcctttgttcttctcttagggggagtttgctcgatattctacgcaaacgcaacgattataaaggttgccgcgttcaccccgcgaccccgcgccgacatgtggacacgggcatggcctacgttgttcagcaaatattcaagttttcaccggtggttctttgaggcggccgcatccatcctttgagattcgagcggttaactatcaattaccggcaaacgaaagcaaaccggcgaggtttccgcagaccccataactgaataccttcttcttcctctctccttttcaaggcccggtcccgcagcccgggccttttccttttgtgttgggaacgatgggtcaaacgcacgatacgagctcacggagcaagcgtggccaacggcactaccaataccccatcatcccggcgataagcggcagccgtagcggtcagcaccatcaagaatgacggacggccttcgtgatcttgatcaattctgtcagccaactttttcaaatgggccgccgcaatatcaacctgcttttctccgagcttgacctcaatgagagcccatcgtccatcatgcaggccaatgaccgcatcagattccaatcccgtcttatcccgataatggaacacatctccgccaagcgcatcagcatacacacgcagatcgcgaatacacatggactcaaacagcaagccaaaggtctcgaaatcattaaggagtttctccggggtcgcgtgcagtaccgcacaagctatcgacgggtcgctgaagtgtctggttgggctcgttctcactgcagtcttagaacgtaaacgagggttccaagctggaagatcttcagttacgcaagctcgcgacaatgcatctaaataatcggagagtgtaccttccgaaggcggttcaccctgcatatccgccgcgatagtggattgcgacgcctgagaagaaatattgcgcgcatacgagcgcataatcagacgcatccaagttttattgcgctttataccatccatacgattgatgtcagaatcaagtagttcttcgacataatccgcggccatgcgcaaggcaacatttactcgagattcgactactgcttcaggccagccaccgcggcatagcgcaaacgcggtgttttcaatatcgaaatcggagaaacccgaaacatcatggttgccatcgaacaactctcccaacgaaacaacgcccgtcgattcctgcgattcaaataaggacatggtacgcatggttaatcgggcaattcttcccactccggaatgagctggttcctgttgaggagtcgccgatccagttaggatgaatcggccacgaccgcgccctcgatcgatggcgaaacgcaccgcgtcccacaattgcggggccatctgccattcatcaatgagtctcggctcctcacctcgcaggatgagagaaggctttgtatcagccaaggccaacagcgtagcactgcgatccgggtcctgcatgaagacctgactcgccgactgcctttctgccgttgcagtcttgccacaccattttggacctttaatctgaacggcaccagaagactgcaatgcctgagtcagcaacccatcagccactcgaggaaggtactcgccacgttgaatctccgagctctccactgccatatgtgccctcccgcaaaccgtcgaaacatcaacctataaatcactctattgcggaagttggaccattctaattgtggaagttggaccattttcgttgcggaagttggaccattcctattagggaagttggacactagattacgaactagacttttcctttttgcagcaacagtgccaccaacacgatgggcgtcatcaccgcctatcgccagacccttttccttgacctaaaaagatgagatgcccagacagtgccatcttttctctgagcacactagccaattcggaacgcagcggcgaacccgtgatccgcgcatcctctgcaaccgtgcctttgacgttcggcaatctggtgaatgagcttttgctcaggcgttcttcgcgattcatttctttggtcggaaaacagaatacgcgggaacgcccctcacgcctacgaaaccaacggctcgacgacgaaccgacatccacgaaaacagcaatagcgcctctttttatcgggtaacatattccctctttatgcattcatacccccctatttgaaagctctgccaaatattgccgacgccgcgacttatcatgttgccatactttgcaatcctttgcagccccttgcatctcaacggcttgtccgaagtaagccacatcgctgacggccgtagcaacgttgttcgtatcgcatttttcagacttcttatgcccccctatattgcccccatatggcccccgtcggcatgttgcatgaaaggcttggcacggagtaacgtttcgcagtgtggcgcgtgcggtgttgccatttgcgacagcacctatgccacgcacgactaagacggacccggccgtcttgtataagcaaatcatgagcagatcaaacggaggaacaggcgactatggcattgctgcatcgacgttcgacgagtaagcgtgcctcacagaaaatgcgggaaaacaacgcggtcatgccggatgacgcatctgcaaatgacaacgtttcctcagcgcgccccgagcccacagcattcgttccaactccatttgacgaagtcatcgatatcagcgatctcgtggccgagcgccgacgcctgcagcgcaatctgtgggcgatgcgcatcatcaccattgtgttgctgatcgccgcaatcgccgtggcctgctttccgctagcgttgcaattcgagtccgaccgcaacttggccgccaccacagccaccacggccaaagaagtagctggctggccttacccgcaggcggaagacaagctcacggcggcccgcgcatacaacaagaagctcgctgaatccggccagcctatcttgggtgaagccgtcgatccgttcgccgccgctcaagggggatcccaagccagcggcgaggattccgcctcaaagaaagacaaggaataccagtcactgcttaataccggcaacggcgtgatgggcacaatcaaggtgcccaagcagtccatcaatctgccgttttatcacggcacttccgaggaagcactggcttctggtgccggccacttgtacggcacgtcgctgccggtgggaggtaaatccacccattcggtcattaccgggcaccgcgggttggttgaagcgctgatgttcacccgtttggacgaggtgaaagagggcgacttcttctacatcgaagtcatgggcgaaactttgggctacaaagtggaccgcatttcggtgattttgccggatgacacgtcgaagctcaagatcgtgccgggtgaggatcgcgtcactttgatgacctgtacgccatacggcgtgaacacgcaccgactgcttatctccgggcaccgcgtggcgattccgatgccggcccccgagccgaatgacgtgcttgacgcgcgcaatatcgcccttggtgttggtctaggcatactggcggcaggactgttcattatctggttggcacgacgccacaaggccgcgcgcatcatccgccacggcgcattctggccgtggatgcgccgcaagggcgaaagcgccaatgatacgctggcttaggcctcgcgccgaccggccagtgccctgcccagcgtgatttcgtcggcatactccaagtcggagcccaccggcaggccgctggcaagtcgggtgaccttgacacctacgggtcgcaatagctgggtcaagtagctggtggtggcctcgccttcaatattcgggtcgagcgccataatcacttccttgacctcatcgccttctaagcgtttgagcagaccgggaatacgcaggtcggcagggccaacgttggccattgggttgattgcgccgccgagcacatggtataggccgtggtattcgcgcgtgcgctcgatgctcatcacatccttgggctcttcgaccacgcagatcaccgaacggtcgcgtctcgggtcggcgcataccgggcaggggctggattcgcacacgttgccgcaaatatcacagaagcggatcttggccttgacctcttcgatggcctcggccaaatcgcgcgcttcatcttcgggcgcggacagcatgtagaaggcgatacgctgcgcgcccttcggcccgatgccgggcagccgcccgaaagcgtcgatcagtcgttgtattgcgccgtcataagcaagtgccatgggtattcctcgttattcgtcctcattattcatccgagtgcttcttggcaggctggatgttcttggggttcttcggatcatctgccgcgaattgctcgacttttttgacctcgaatagctttttcagatcgtcgagattcatggccgtcgcctcgccgagcggctggtcgctcatcgagtattcgtcatcctcggccgcgacttgcggttgtggtttcggctggggctggggctggctattccacgggtcggcattcggggtcggctgtgcgggttgcggttgattccacgggtcatcgccggcagccggctgcggaaccgattggggctggttccacgggtcatcgcccgacatattgcccgacactgtctgaggaaccgaagaagccggagtctgggactgaggctgattccacgggtcgtctcctggctgcggagccgcctgagcctggttcccctgcggttgattccacggatcatcgtgaggagactgctgatatggctggttccacgggtcggcttcggccggtcgcgacgccggtgagaccgcggcctgagactgcgtctgattccatggatcgtcgctcgcgccggcaactgccgtaacggaagatgcggtggctggctgcccagtggactgtccagtgggtccagcggacgcaacggacgcagtgggtgcaacaggagcagccggagcggcccacggatcaacaccgtcactgatgtccggaaccgcaacatgcttcttgtgatgctcttcgggcgcaggcgtagcagcgggctcgttaggcgcgaacccgtctgcagattgcggcgaagcgttgcttacggccggcttggcccaagggtcatcgtcactccagttcttcgctgccgtggatgcactggattgtccggctcgatggctgtcgtctgcgtcctcggcttggcctgttgcagtcggcttcggagctttcgtctcgctccccatatgaatgtccaggctcgcgcccaaactcgacgcggccaatccagccttggccatggcaatctgctgcttgaccttggccaattgctccgggctcatacgtttgacggattcgactcgctcgccattcgccgcgaccgcagaaggtgcaataaccgcattggcgccgaactcgttgcgcacggcatccatcaccacggccgccgccttcttaccgctgttatccacggccaaggcgaaagcgtgctggctcagcgacttgtcgaacgtcatcgacaagcaaggcagacccttacggttggggccgaattttacggtcggcaccttgtctcgtgacacatattcacgaatggtttccggcaaagcggcgacggctgcatcccacttctcgtcgatggaccgattatccgatgccgcaggcgaggtcaccggttgagccgggacggccggcgacgcggcgggcgcgccccacccggcattggcggcaggagcggcaccggcagcagcagttgctacagcaggttgcacagacagagagcccgcgggtcggtcgctgaccgggccgttgacagggccattgcctccaacagattcatgggaagcggtgctctgaggcgcggctgcttgctggttgcgtgcagcaccggagaatccgccatgtgaggctccggcaaacccgcctcgcgatgcgccggcaaaaccactggcacccataccggaagcggctggcgtagtcgaagtcgaagaagcagccgcaggcggcataccagaagaagctggcgcgggagcggctgttgcaaagcctgattcactgccggccaacaatcgcgcggccagcagttccaagcgcatacgcggagaaatggctccggtcatggcacccaacgtagtgttgatgatgtctgccattgcggtcagtgcgcccagtcccagcgccttggcttggcggtgcagatcgtccatatcctcggcctcagccgtgtcggacagcacggattccgcacggtccccggccaacgtaagcaccagcagatcacgcacacgagccagtaggtcttcgacgaatcgtctcggatcgaatccgccgaccacgactttctggataacgccgtacagggcttcgccgttgtgatcgattaccgcatccacggcctcaccgatcagcgcctccggcgtgaagccgagcagggctacagcggcatcatgggtgataacgccttcgaccgaaccaaccatcagctggtcaagcacggacagggtatctcgcatggagccgccaccggcgcgcatcgccagtttcagcacaccgggctcgggcttgatgccttccttgtcgcagatcgtctccaggtagggacccatgacttcctgcggcaccagacggaacggatagtggtgggtgcgcgaacggatggtgccgatcaccttgtctggttcggtggtggcgaagatgaacatcacatgttcaggcggctcttcaacgattttaagcagcgcattgaagccctgctgcgtgaccatgtgggcctcatcgagaatgaaaatcttatagcggtcgcgcgcaggggcgaaaccagcgcgttctcgcaattctcgagcatcatccacaccgttgtgcgaggccgcatcgatttcgaccacgtcgatggaacccggaccgccggtggccaggtccttgcagctttcgcattcgccgcaggggcgggaagtcggccctttggcacagttgacgcaacgggccaggatacgcgcggagctggttttgccgcagcctcgcggccctgagaacagataggcatgtgtgagcttgccctcgtccaaggcgcgcatcagcgggaccgtgacttggtcctggccgatgaccccttcgaaggtgtccggacgatagcgacgatacagtgcaagtgccatagctactaacctacctttgccctcagaattaaccgataaaaagtcaagataaaccgggctcatagttgccgaatcggaaaactctttatattccaacgacattcacctgacaacggttaccgcatttttattgttattaaccgctttctttgtattaacatagtgtcaataacggttgtggtcaggaggcacccatgagcgataccctcgacgagaaacgccccacccgcggcgatgcccggcgcgacgccatcgtgcaagccgcgcgcaaggtgtgtctggaaaaaggcttctccaaaatcaccgtttccgacatcgcaagcgaagtcggtatgacgcgttcgctgttctaccactacttcgaagacaaggaagccgtagctgacgcagtactcgataacgtcatcgacgaaatcctcaccacgttgaagcagtggaaccaagcgcgcgaaacaggcaacgtgaacaaggcattagacgacatcgtgcatgtgctccgctccctgatcgccgacgagagccccttctcaaaccgtatgatccaagacggcaacgccgaactgtatatcaagttcattgaccgcgcggcggaccgtattgccgactacattgcccagaccaccgtacgtgatttcgagcagatgcatggcctgccaatcaccaacgtccatgagacgttcttcacactgattgtggggcttatctcgctgattcgctcgcatccgaacatcagcgaccgaaccatcaaagaggtcatggcgcagacgctgcatatcgaaagctatgtcgtctgaggtctgacggccattggctctggtaccgctctcccgcactcccctcagtccgcttcgcggccagctcgtccgcaattgcggacagcctacggctgactttcttctggttcgactatcgtcgaaccctcgcctacaaacagcccactgggctgtttgctttacggctcagcctaatgaggggagccaatataatcgggtcacgcgaactggccggtcacgggatcgcgaccatctcgggcaatggcgttgagcacttcctgtcgggaatccacctcacgggcggctacggccggcggcactagcacgcgcaacgcgcagtcctcggccactaccctaaatggcaaatgcccgatatattcgccgtccgccatcagcaccgacggctcgtctccttccgttgcccgcgtgacttcgatttcacggatacgtttccagccgaacacctttgaagcaagtagcttgccgttataggcattcgaaatggccaccgcgcattcgccgaagttcggcacgtggtccatccacaccaggtccaacaatccatcggagaagcaggagtacggcgagacctcaatgccgccaccgatatgcctcgaattcgcaatcgtcagcaatggtgtgatgatgtctcgttcatccgtggtcccgtccgccaatgtggctttgatgtggtaaccataacgcttcatatgcgtcagctccaccagcaccgccgcaaagtagcgcatggtgccggtcggcagatgcgaatgattcgcacggtcgttgatgctcgcgtcaagaccacaggacagcatgcccgcatagtaccggtcaatcggatgctcggcggacttgctctcctggtactcgtactcctcgccagtggagggatccacggcatagccgccgtccaaagaggtcacgcgtcccatgtccacatcgatgtgtgatccgcgcacgatagcaccgacgataccttccactgcggtttcgatacggttgaccggcagcttcagtcctcgtgcgaaatcgttgcccgaccccgtggccacgatgcccaacggcttgccactgcagcccacggcgttcgctccaagtgcgatcatgccgtcgccaccgaccactacgagatagtcgtactcgtgcgcgcgttcacgcgcctggttcagggaatcgtcgaaactcgtgccggtgatgtcgatgacgtcgaagttatgggcacggccggcttcctccagcagacccaatacctgcgcgtccaccttagcgccacggcctttatcggaagtggggttgcccaccatggccaccacgcgacggcgctcgttgcgttcactctcgctcatgctctcaccttagccaaaggcccagaagcccgccagagtatcggtgctttacggtccattattgtgataattgtctccttccgtacaactcaccggtccggcccgagccatccgctccacggatgatgccaccaggaccatggtttccaccttgatggttaccaacacgtcttcatcccgcacggagcaggagcccaaaactacaccattcgcttcagccatgttggcggcgagcgcacatggatcaccgatatccgcatgccacagcgcatacgcggcgtcaaaggcgataaggtcggcgagggaacgcgctcggttctggcagatcatgaggctgcccacacttgccgccaccgcgagcgcaatgcccaccaccataaccagcatggctccggccatcgtgcccgatccctcctcataacgcattccctgcaccgcagttcctttctgttgcggccgcccagccagccgaccgttattggcttatcgccgtagcgttgccggtaacccgcgttggagttacatccagcggaccgggcaataccgaacattcgaccgtcacactcgtcgattggccgtcgtgggcaatgctgacgtggggctctcccccggcaacgtccgcagctatgctgcgcgcggatgattcgtcaccggtaaccacaaactcgcgtgcagccgctgccgcggcactttgacagtccatggaaacgatgaccacacgtcctattgccaatatcagcccggcgatggcgataatgctgggcaatacgattgcgaattcggcggtggccgatcccgtgcataggtctggcggcagtctggcgagccgccaccggcatgtcatggtcttcatggctgtcacccgactttcagagcctgtttgatgatgttggtcagcaacgtcttgatggcatccgacttcaggatggcgaccagcaccgccgcaaagcctgtagccgcaacgagtacgactgcgtattccgcagtggccgcgccttcttcgggctcagccatgagggtgcggatgcgtgcgtccatgaggcatagccgttctttcgccttggcgttcagcgtggccacacgagccttgctgtgcgcaaagatgccggcctgcccgtcgacgatgacggggataggggtattcattggcgttcctttcggtaaggaggggaagctgcgcagtggcttcgcaccttccccatgcgtgtgtgagtggttggcccccgcgccgggttgacgcggggtgcataccactgtggactatcaacgcttcatgcaccagggaaaacggggtatgtggttctagcttgccgagttatccacaccccgacgtgtcgtccaccaccaatgtggatagccaaacgcagccaagtgcaataccgagcaatacaacaagattcaccctaagcgcactcagttcacgcctatattcacatcatgaaggacgcaatcgccggaatgactcctaccagcacgaatgccggcagaaaacatagccctgtaggcatcagtagctttaccgacagcttcgcggcattccgttcgatggcggcacgctcgtcacggtccagctgttcaatggcggattcgaggcgcacgccaggcatatcgccatgcgtccatgacgattccaaagccgattgcagcaggccaagatctcgttgcgttctgctggtacgttttccggatgaactatcagctggcgcaccctcatgctgaacagccatagcggcatgccacgcatcagcccagggaacccctctggccagggagctcccgacctcgctcatgcgagcgccgcagtcgccgccgacggctttgcccaccatgtcaagcgcccggggaatcgaggagccctgacgcaaggacacctgcaacatacgcaatatgagtatggtccatgacgacccgcaatcatgcgctacggccggttcctcgcccggcaagcggctgtcatgacgagacggagccttatacagccaactagcgatcgccgcacagcctgccgcggcgtgtacccacaccgtactcataatccgctgcctttcaacaatgcccgcatccatgccaagccggcagcataacaacatccccctaataccaagcagaccacaccgcgtggcgatccaagcaagaacgccaatggtctagctcccagaagctcgcccaatgccacagtgacggccggaagcgcgctcagcagccccacagtggctttaggaacggcacatgcttgcgatcgcaggttctgcatcagcctcatctgccggtaagcagtcaataccgcttccagacatggcactgcttggcaaccgagctcatcgctcaaaaccgctgcggcggtgaccccgcgtgcagcttcaagtacctgcgctggtgattcgtcgggcagacgccgctgttcgaacaccgttatgagccgttccacagtaatgcgctgagtggcgaagcgtctgctggattgttcctcgaatgcttcaaccaatgtgccgccacctcgcaatcgcgcgatggcggacgtaatcacctgcgcaacgcccacgcgaggtgagccggcatatcgaggttcgtttatggctgcggaatcgaccgcacgcccgcagtaagccagccgatacagcctcccggacttgttccccggccatatcagcacggcgagcgccaccagaacagcacaccacatcatcacccaccaccactcggtccgggaacgatgccccatcgttcaatgaagtgcccccattcggcggcataccgaggaggatggcagccattccataccgccagcggtgttcctgccagttcaccatgtgctacacgcagttcgccgatctgcgtgatacgccgctgtccgttcactcgctccaaatgcaccaccgcgtcgaaagcgcctgccgccagcatggccaacgcctgtggactgactccggcgagtaatccaagcgaaatcagcctggacggtactcggttcacgccgtccgcatgcacagtggtcatgccaccgtgatgaccagaattgaacgcgcgcaataggtcgacgatttccgcgccacggcattcgcccagcaccacgcggtcggggcgcattcgcaacgtcgctttgaccaagtccgtcagacttatggctccgacgccctccacattcgcctcgcgcgttaccaacgacacatgatcgccacgccccagttctcccagttcacgaacttcctctacggtgacgatgcgctcgttcacatcgcattgcgccagcagcgccttgagcaaggtggtcttgcccacgcctgttccgccggtaatcagcactgtggcatgtctgcgcaccagtcccacgaacatcggcagccaagcagccgggaatacacctaattggctcagatgtcgcaacgatgccatggtcctgtcagggaaccgtatggagattgcggcaccttgtggcaccaatggggcaatcaccgcatgcacgcggatgccgtctggactggcggcgtccgctatcgggcaggcatcatccagtctgcgcccaagctgcgcgcacagttggacggcgtattctcgaactacttgcggcgagcgaaacggcacacgcaatactgtttctcgcatgccgttgccgcggtccgcccaaacgcggccatcacaggtcaccgccagatcggtaacctgcgggtcggatgccacatcattcaatagaccgaagaacacagttctgggcactgcgccgggctcatcagcccgagtgattacggcagccataccgcatcaccggtccttgcaagaagctcccgaaaccgggcgaatggcctgctcgacaagatcggcaagcaagctcacggctttgcggctgcctttggtcaccgatctgatgccgaggccttccagtacgtctccacacagattgacacttggtttgacaggccccaataccgtggcagtcaaatagtcctgcgcctcaccaatacccacgtggcctctcccacgtggagcgccacgtggttccacgccgacgatatgtggcgcttcacagccccatgaatccagtctggaccggtgcgacttggctctggccagccccatcaccgacaattccgcggcaatcacctgcatgccactgcgcagatcgggtacggtctcaatgagtccaccctgaccggcatctacgatgacaacgtcgttcgtttccgccaaggctcgaatggccgcttgaacttcccaccagtcaggctggcgcgcgctccaagggtcatagggaagtactcgcacaccctcccacatcatcagctcatggttcatcgcatcgccctcgatgcggccgaggggtgcgtcgacttggctgaatcgtaaacccggctctcgttctacacccagcagcaggtcaaggcatccggccacgaaatcagcgtctatgagagcgcagctgtgttcacgtctcgccaatgtccatgcaagcatggaagccatgacactcaaccccacgcctccatgacctgacgtcatcgtcacaatgttatggaagctggtgtctgtagttagggcgagtgccggagcctcgcccgatctctgccgttcgcatgaggccaacggcctgggcggcggagtgtagtagcgatgcgctggaatcggcgcatcgtccgtgggcagcggaatgcccggaggtgctaccgctggcgaggtgatcctacgcgccacgcggggtgtggtgttgctattcataagccgattgaaacgtgtccgagttcaatgctcaacacgaatcgaccattgtggttctagcttgctgagttatccacaccccggcatgtcgtccacgacaaatgtggataaccacgctgttgtttcacgcccatctcatgcagaaaaggccctgacctcatatgcacagtcagggccttcattttcacgacgattccttatgcggtaatctacattccttgcttacttatcgaggttcttgatgccgtcttccatgacgtccaactgagcatcggtcaccttggccggcttcttcttgccgaacttggccttgagcagaccgatgatggtcggggcgagcgaaaccagcagaatcagcacgatcaccagttcgaagtgatcctgcacggccggaatgttgccgaagaagtagcccagcagcgtgaacaacgtggaccagcacaggccgccgagcactgagaacggcgtgaaacggctccaacgcataccggaaataccggaaatgaacggcatgaacgtacgaatgaacgggaagaagcggcccaggaacacagccagcgggccccacttttcaatcatgccctcggttttggccagtcgctcaggagtcagcgccttcaccttgccggattggataatacggcggccaaagaaatgaccgatgaagtagttgcactggtcgccgataatcggcgcgcaccaaaccaccggcagcaaccagaacagcggcagcgcggccttgccggtcgcagcatccggggctgcgaacacgccggccgcgaacaacagcgaatcaccgggcaggaacgggaagaacaccacgcccgtttcgatgaatacgatgaggaagatgaatccgagggtcggcgccacgcccatggcaatccaaccggcaatcgcggcacgcggatccttcagcagttcgatgatgaaattaacgaagcccatgtgtttcctatgagtcctaaatcttgtattgagctgccagcccaatgaaccagacagttatatgcaaaccgtcaaataccctaccagccggcctataacatcaggtcgactggggtttcccacacaaactccgcaatacaaacgaaatttctactcccccaaacgctgccgcacaaaggcgtccagcgcggccgcatcgatgccctcatacgagtcgatggaggcaaactggccaaggccggaagtgtcggtgcgaatccagccagtctgcgcaatcagtgtggcccccgaggcggcgccggagcgcagaccggatgaggaatcttccattaccacgcacttgaccatgtcttcaggcgcgatgccgagtctctcagccgcggccagatatggggcagggctcggcttgtgctcgtacggatcatcgccgcagacgtagccggcaagcaatccatcagcctgcttcatgatgttctcggccatgcggcgaggcgaagtagtgaccagcatggatgggatgtcggcttccttgagcgaatgcagcacgtcttgcacaccaggaatccacggcagacgttcgacctccgccttgaacacataatccttgagctgcttgtcgatttcgggaacgctcaatgtgcagccatgcgcaatcatgacctctgccacgtgtggtaccggagtgccggagcactcccaaccgaggtcctcgttccactcgccgccattgttgtgcgcgatctcaatctcaccgtcatgccagagcggctcagaatcgatgagagtaccgtccaaatcccagaacacggctttgagcagcatagttacctccgtccacatgcccgcacgccaattggcgcctttactcttgctgcattccattgcaccaatcggatgcgacaaccatagcgcgtcagcacaccgcccctgcgcctcagcgcatggtcagcccaccatcgacgtgcagacattgtccggtaatgaagccggccatgtcggacgccaacaacgcgacccctccggcgatgtcatcgggacgggcaaggcggccaagaggcgtcatggcaatgattcgttcacgaacatcctcggtggtggctgcgctggatgcggttccggccgtcaaacctgcggcaatggcattaacggtaatgccgaagccgcccagctcctgggccagagagcgggtcatgccgaccaagccgcctttggcagtgatatacgaatggtagggcacgatgggcgaatcgaccagattgctggagatgttgatgatacgcccggaggtctgggctcgcatcagcggcaccacatgtgagcacatcagatatgcaccatgcaggcatccctcgatctgtgcgctaaactcatcccaatcgcctccagcaaaagtggaacggcgacgcgggtcaaaggagaagcgtccgaaagcattattcactaagatgtccacgccgccgaatgagtcgacagcggtacccactagcttggaagattgcgattcatcgcaaacatccgcctgtacagctatagccaagcctcccagcgagtggatgtcttcaacggtgcgctgcgcgctggcggcgtcatgtacgtaattgatgacgacagcggctccgtgcgatgccaggcatttcgccacagccgctcctatgcccttgccggaaccggtgatgatcgctgttctgccatccagattcaccattggacgccgtgccatatcgctttgctctgtcattacccttgcctttcgccctgctaccagcctctgctgcccgcaacagcacaggcctattccatatccatatcgaacgaatcgctgtacgcgtcgctgccgcgttcgacatccaccgcgcgcaacagatcgatgaggttgaagcccccatcatgatgccagccggatttcgcccgatccatctcaccgagcggacagatgcgattcacaccgacctcggccaatgtatctgcaagaccaaacagtctggttgaatccacagcgacaccgcagctctgcagccagccacggcaggaagtcagtcttctggcagcgtccaacaaatctggcaccgccaccacgttgacggtgcggttcaacggcgacatcagcgaagcaacatcctcgtcggcaccgctaccgtcaagttctcgatacagcaccgaccatgccgtgctatggccactggcgaacaccgcggccttcccgcccatcaaggctctcatctcagcgtcggtgcgcgcccgctgaatggccacgttctcggcgtcactcaatacggagcgcggatatttgcgctgctgattctcaagctcgccaccgagcagctgagccacttcacgaggggtgagggctccatcagtctccacgaacacggtctgcggagccaggcagctttgctggtcatatgtggcgatgtcaacagccacacgatgcacggtatcggcataggtatcaggacgcaaagcctctcggccaatgaacgccaacccgacttttgctccgtaacctagacagggcttggacccggcgactttgcccgcaatcaatttggtagtctgcgaagaaccgtaaacaatcacggcatcggccgcatcgatggctgaatcctcgagctgctgcgagccgcccttccatggaaccaccgcaatggcatcagcgaggtcggaattgaccatcgcaatgctgcgagcaaagaacgcaggcatcaccggctcggaaaatgaagatttgccaagaatcgcgcctttgaccagcagggtcatcgccatgctccacacgggaatccccggcacattgctggagaacacctgataggtgagcgctgggcccacatatttagagtatccccccgccttgttcggccggaattcgtcaagcatagacggctgaccgatttcggagtcaaggaaccggagcagttcacgacgcctgaactggcgcatataccgtttgagctcaatccgcaccatgtcaggctcatatccggtgattgcgggaatcagcagttcagcctgacgccgcagctcaaaatccggatcggcccatagttgggccgcgtcggccacgatgtcgagaatatcgttgacactcatcgcggcaagcgtgcggttgcgaacatcggcaagctgcttggcaagggaagtcacctttgggccatccagtcgcggatagcgcaagcgcttcaccccatccgatgtggcgacctcatagatttcgtaatccgaaacatccactcccgagggcaggtggaagacatcaatggcctgactcacggattcatcaacggttggcactgatgacctcgtctaccgcaattgagcacccacgagcctctgctcccttcgccctgccctgcagcaggaatccgtccggggtccgatggccgagatcctcggtcagaataccgatgcatgaattccaattggcaaggtcgtaatgggctatcacaccggtctcaccatccttgacgggagtcagcgtttccggatcgaggaagaccgtacgcacccaggcggggttcgccttgagatagttgctggtgccatccgtataccacgacagaatattttggtcatagatctgcgagctcaactcggtcatgccatacatgttgacgcagtggtggcgcggcacccccagtgtctgttccagctcatcaagcatctggtcttcggtgatgtcgcgcttagtgctcttgaagccgccagtgtcgaacaaccggctatcgggggccagcgcgaacgtcagatcatgctcatgcaggtaatcgagcagatacagataggacgacgagacacccatcagcatcaccggttcaccgtcagacaccgcacggttaaggaaggcgatgatttcatcgaacttgagtccatgctcgtcgaagaacacaccgctgccttcgctgccgcagcactccacggccttggtaaggtagcgcgacagggaggagttctggttcatgtcccatgccggcgaaatcacggcgatgcggatacgctctcgatccggcatgatgaaatgacggaacggcacaatcattgattcatcccacacctcaagatcggggtggaagttgcgcccacgcatcttgccgccatgcgtggttccgctcgtcatgaatacggcttcgcactgctcggtcggtatggtcgaaaggtcaaggtgcttgaacccgtccaccggcatcgacggaatctcccgccaatccttgagcgttgcgggggtgacgcgtttagccgcgcagtaacgacggtacggcagatcatacgtgtactgatagatgaacacgtcgcgcgccaacgcaccaaacgcctcttccggggcctgctcacagccataggtatggataaaatccagaatcccgcgcttgatacgacgcgcgtcatccatcacatcagtcattgcatcgctcctgtcaatatccaatatcaaccagcattatcgttcatcgtacgccgcagcgccagtctcatccgccggatcggctgctggaacatccacggacgccggcgcacgatgtttcgccaccaaatccggaagagcgacgaaaagcgcattgagaatgatggcgctgaatacaccgaccatgatgttgttgccaaagaacacgcttgcgccgccggtcagaccggagagcgccttgggcagggcgatgccgagcaacagagacatgccgatgaccgtttgacggcgctcgtcatcagcgaccttgcgcagggcgcgcaggccggtcacgattaggctggccgcagccggcaggaaaatgcctccgacgactgccgagggaatgacggacagcaacgcgcccgcctttggcacgaagcccagaatcagcaacagcacagcggcgatgatcacaggcgtgcgcgtgcgcaacttgccttcgccggtcaggttgagcaggccgacattttgcgggtaggcggtggtggtgaatccaccaatcagcgaggaaatggctgaaccggccgcctcgccggcaagaccgtagcgcacctgcttgcgttcgaggggcgtgccctgaatctcagaagccgcctgatagacgccgagagcttccatgacggcaaccatgtaggcgatgaagaacgggatgaagatcttccagtcaaatatgaacggaccgtagggcaggaaggtcggcaggcccagccatcccttggatgccacaggagagaagtccaccatgccaaatgctgcggcgaccacggtgccgacgacgagcgcgatgaggaatgagaacgacttgagcaggcccttgccgagcaacgacaggacaagcacaatcgccgtggtcagaatcgacacggtcaggatgtgcggatcggcgaacgtcttgtcgccgggagccccgcctagaaactcgctcagcgtgaatccagacagcgagacaccgaccataaagatgaccacgcccgaaatcatcggagagaacaggaaccgcatccgctctatcacaccggtcaggcacagcaacaggaacacaagcgaagcgatgagaatggacgaactcgccgcccccagcatgccggccgtacctgccgcgatcatcaacgcgtcaaacgcggctgacggcccctgcaccaccggcaggcgaaccagccgagtggcctgaaccaaagtaaccagaccagagacgatgaagatggcgttaatcatattcgacgacagggcaataggtaagccgattgctccggccacaaacaccggatcaagccagacgttggaaacaagcacatgctggaaacccagcagtacgttctgggcggtcagctccttgcgtattgacatacgcttcctctctctcaacgcgtatatgggatgccgagccgaacagaggagttcaaccgtcgcattccctacgcgagtgttagctcacaggttcgaagggttcggcacataccgtctcagcctaaagcaccccttacgaatcggttttcgcacgtcaccgtaacaaaccttgacatctccgtcaagaagattcgtgcttttcggcagctgcccgatgtgagataacaaacagttttacgaatggagaaggaatcgaagcaatgcggccagactcaccaaccccacaggaccatggacttggagtcggcgggagtgtagttggagtcgccggtggcgccggcagcgatatcggcggcagtatcgcggccgggcagttcgcgggtttcgcggcggatggcgttgcgccagaggcgggcgcggttggagcgttgtacctccacgatattgccgtcacggcctgcggcgaaaacgctctcctggtcgccggtttgcatgcgtttgacttcgcggcgcagttggcgattctcttcttcgaggaccaaaatgcgcgcgataccggaaaggttgatgccctcatcctggctcaggcgctgagctcgggtcaggcgggcaatgtcgcgcaggcagtagcggcgtgcgccgccatcggtgcgctgcggacgaaccaaaccgaggcggtcgtactgacggagagtctgggggtgaatgttggccaactcggcggtctggccgacggtgaagatgggcagttcgatgtcgaagccgacgtcatcggctccgtcgagatcggccctgcccatcacgagcgcggttgcgcacatcgcgtataactgcttcatctggttggctaaccgcgccattgttcacctcctgattacaggctgagatagtcgccggctttttcgtcgaattctttggcggcgtgcttgacggccagacccggcttggcggggaccatgatctgcacacggccgatcaggtcgcccggctggttgctgcgctggacgccaagtcccgcgagcttgacttccgcgccggagctggagcctgccggcaccttgaaggtgacgggattgccgtcgatatccttggcctcgaccttgccaccggccacggcctggcccacagttacgggcaggtccatgacgatatcatggccgcgcatcgagaatgtggcatcgggcttgacagtgacgtgcaggtacaggtcaccggccttgccgccgttgatgcctggcttgcccttgccggccagcttgattttctgtccgtccttgacgcccgcaggcacgtgggccttgaacttcttgccgtccacggacagggacacggtagcgcccttgaccgcctgacgcagggtcaggctgatcttggagttgcggtcctcgccgttttcggggcgcggggcctcctcatagccatagccgccggcattgccgtacggcgattggccgtagccgccatacggctggccgccctgacctgcagcaccgccgaacatcgagaagatgtcgttgatgttgttggggccgccgcccgaagtggagaagcggatgcgcgagccattgccgccggcaccctggccgaacatggaaccaaagatgtcggagaaaccggaagcatcgaagccgccggtgccggaaccgccggcgaagcgggcaccgcccatgccgaactgacgaatcgcgtcgtacttctggcgatcttccttcttgctcagcacgtcataggcttcggagatgtccttgaacttctcctcggcttccttggtcttgttgacgtcaggatggtatttgcgggcgagcttgcggtacgccttcttgatgtcgtcgtccgaagcgtccttggagacaccaaggactttgtagaagtctttgctgagccattcgttttcagccattcatgtctcctttctagaaaagtttatgtaattgcacctccctctgatgagggaggtggcatcgcgcagcgatgacggagggaaagatagcggggactatgggcatcaagaatgtggccctctgtcttccgcggcctgcggccggcttctctccctcagtcagcttcgctgacagctccctcatcagagggagctaaggcactgtcaactcattgcagcgagctggatgtcagttttgcggggaggctactactactcgggcggcgcggattacgcgatcgccgatgcggtagccggcctcgaccacggtgtcaaccgtttccttttcggcatccgcgtccggcttgtgcaggatcgcgtcatgcttggtggggtcgaagtcctcgcccttttcgccgaacttctcgacgccgaacttctcgaaggccttgtcaatcttggtggcgacggccttgaacgagtcgtccatctcgctgtgttcgcgaatgcggtcgatatcgtcgagggcgggcagcagcgcggtcagcacgtcgatgatgccgtgctggcggaagcgctcctgctccttctgcgtgcgattgcggtagttgatgaactccgcacgttcgcgttgcagggcttcgaggtagtctgcggcttccttcttggccttgccgagcggggtgagggtgtctgcggaatcggactggccttcgccagtcttctctccctcagctgcggcaggagccgcgtcggctccttcattggaaggagcctgggcagccgaatcctgcgcagagccggactcggcggaggcgtcagcccctgaagaggcctgagcggcagcctcagcatctgagggatccggcaggtcgttcaggtagtcgtccttgttgaactcggacatcacttgttgtccttgtcgtcatcgtcgtccacgacctcggcctcgacggtgtcgtcgtcggaaccggaggcggagccagcggaagcgccggcaccgtcagcaccagcggcagcaccctcggcaccctgctgggcgtagaggacctggccgatcttctgggcggcggtcatcagctcggtctgagcggtcttgaccttctcggtgtcgtcacccttcagggcttccttcagagcgttgaccttgtcggtgacttccttgacgatgtcgtcggagagcttgtccttgttgtcgttgacgagcttctcggtggagtaggcgaaggcctcggcctggttgcgggtctcggcgtcttccttgcgcttcttgtcctcagcctcatgagcttcggcttccttgaccatgcggtcgatctcgtccttcggcaggccggaaccaccggtgatggtcatggactgctccttgccggtgcccttgtccttagcggacacgtgcacgatgccgttggcgtcgatgtcgaaggtgacctcgatctgcgggacgccacgcggagccggagcgatgccggtcagctcgaaggtgcccagcggcttgttgtcgcgagcgaactcacgctcaccctggtagacctgaatcagcacggacggctggttatcttcagcggtggagaagacctcggagcgcttggtcgggatggcggtgttgcgatcgatgagcttggtcatgatgccacccttggtctcgataccgagggacagcggggtcacgtcgataagcaggacgtccttacggtcgcccttgatgacgccggactgcacggcggcaccgacagccacaacctcatccgggttcacggactggttcgcttccttaccaccggtgagctccttgacgagttccttgacggcgggcatacgagtggaaccaccgacgagcaccacgtggtcgatgtcgctcacggagatgccggcgtcgtgcagcacgttgttgaacggcgtgcggcagcgacccagcaggtcggaggtcatttcctcgaagtgcgcacgggtcagagtctcatccaggtgcaccggggtgccgtcaggggtcatggccaggtactgcatggagatgctggtggaggtggaggaggagagctccttcttcgcctgctcagcggcttccttcagacgctgcagcgcgatcttgtccttggacaggtcgacgccgtacttgttcttgacttcggaaaccagccaatcgatgatcttctgatcccagtcgtcaccaccgaggtggttgtcgccgttggtggcctgaacctgaatggtggagaagccgtcgtcatccttgccgatctccagcagggagacatcgaaggtgccgccgccgaggtcgaagaccaggatgcgctcgtcttccttgcccttctcaaggccgtaggccagagcggctgcggtcggctcgttgatgatacgcaggacgttcaggccggcgatcttgccggcgtccttggtggcctgacgctgggcatcgttgaagtatgccgggcaggtgatgacggcgtcggtgacgggctcgccgaggtaggcctcagcatccctcttcagcttcatcaggatctgcgcggaaatctcctgcggggtccacttcttgccgtcgatgtcgacagtccagtcggagcccatgtggcgcttgacggaagaaatagtgcggtcaacgttggtcacggcctgacgcttggccacttcgccgacgaggatctcgccggacttggagaaggccaccacagacggcgtggtgcgcgcgccttcagcgttgacgataacggtgggctcgccaccttcaagagttgcgatgcaggaattcgtggttcccagatcgataccaactgcacgtgccataatgtgtgctccttaattactcgtttgttcttacgttctttgcccaagttccgattggtcgtctcttggaccttccaaacttgagcctacatcactcaacttccatttggcaagttctattcccaatttcaacacaaaaagttgagtatgtttggctcaagttttttgggggagtgactgacggcgatgacggagtggtgcgtttggagccaaaatccacttatacagaaaactgcaaggggtgactggggcgcgccatcagccttgccatcagacttgccagcggcggcgcgcgattgcggcgcatggggtgtgtcggcgacgttattgtcgctgggggcatcgatgcgctgaataactcagacacagtgtttgtcgccgattttctgcgggaattgtttggcaatatcgccaggtatgccgattcgacgcagcgttacgtggtgctggtttccgccgctcaggaccgcgtcaccattgatgtgacggaccgtccgcgtcaaggtgacgcgacgtttgagggggcggcattccgggcttgcgtaccatcgggagcgtgtgctgcatgcgcacggggattgggatgtgcgggagaaacgcgggcagtgggtactgcatgcttcagtgccggtcgataacgctggctaatcgacaacaccggctcatcaataacgccggctaattgataccgccaatcactcgataacgccagccagtcaataacgccggtccccggccgcgccggcgtgggtcgcgagcgaggccgccatcgcgaccgcgcagaccgcggcggccaccgcgacgcccttgtgctgtttcaccttgtgcatgaaaagttcctttccactgaccgcacgatgagtgcaatcgcgaaggccatcccacgcactgcacccggtatgccacgctcttcggcaaccatgccgaacttatcgccgcataccggggcgcacccggatgttgcagaaaactgcaaccgggctcagctgcgcagcaaaatttcttcgagcgcgccggccaccgcatcgggcatgtcggtgatccagaaatcgttggcgtagcgcggaccacggttcatggtacgcagggcgccgatcgcgccgatgccgagcttgtggaccgcctgcagcgcgagctccttggtgcggtagagcatctgggcgtgcagcagtaggtccatcgcgtccgattcgaccggattgtcggcgatgcgcagaccgccgggaatctcgatgcgcagactggcagccgagctgatgccggtgacggacacggtcaggctcatggtcgcctcgtcgtacgccaccgtcgcctcgaccggagcctcgccggaccatgcacgcacgccgctggccgcgtcaaccggcgcgacgccgcggaacacgaccgtccagtcgcgcaactcgggtacggcggacgtatcgccggtaaccggcgcgacggtgaaggcgctgggcgacgcatcggccccgccccacgtgaacgctatcgcggtgtcggcgctgggggcgccccacgtgccgcgatcctcgcgcatgacgaacgagccgtcggcaccagggaacaccagcacgcgcagggcctgcgggttggcgatagagttgatcgcttcgccggattccgcgacgtcctgcaacggcacgatcgcgccggccttggcgaacaccggcgtgcggtcgagcgagcgccagacctccagtcggcggccagcggcgtcggatgagacgtatcggcggccgtcgaagaagtcgaaccactccccctgcggcagccaggcgtcggcgcggccgcggcaggcggcggcatcgtccggggagacgatcggcgcgaccacgagctcggtgccgaagcggaactcatccggcacctcgtaggcgtccggcgtatccgggttctgccagtacatcggctcgaccagcggacggccggcttcggcggcacggtagttcatggtgtacaagtacggcatcatcgcgtggcgcagacgcagcgcgtccaccatcgcggcgctcacgtcacggttgaagttccacggctccttgccggagaacggcgagttggacgaatgcagtcggttgatcgggctgaacgcgccgagctggtaccagcgggcctccagctcttcgttgcggtagccgaacatgtggccgccgatgtcgtggctccaccagccatacccgatgttggaagcggtggcggtgaactgcggctggaaggcgagcgattcccaggtcacgatcgtgtctccggagaagccgaccgggtagcggtgggagccggggccggcgtaccgggagaaggtgagcggccagttgccaccgcgccctgagtcgaggtagtgcatgtggttgagcatccacagcgggtcgagacccttctggcgggtcacgccgccctgctgccagtccagccaccagaagtcgacaccttcggcctccatgcggtggtgcatgtcgaaataggcgtccacgaagtccgggttggtgaggtcgaattccacgttctcctcggtggccgggtcgatgccgacgcgcttggcgacttcggggtaggcgtcctcgaacgcgcgcacgccgtcgcgcgggtggacgttcagtgtggtgcgcaggccgcgccggtgcaggtcggcgaggaaggccggcgggtcggggaacagttcgcgattccacgagtagccggtccagccggaaccgtacttcgggtccacgtcgtccacgcgatgccagtccatgtcgatcacggaggtggtgaacgggatgccctcgcgcttgaagcggtccatcagggccagatagccgtcctgcgtgtaccggtagtagcggctccaccagttgcccatggcgaagcgcggcaggagcggcgtggggccggtcaggcgatagaagtcgcgtacggcctcgatgtagcggtggccatagccgaagaagtacaagtccgtttcggcggtggcgcgcggggatacccaggtgccgaacgggttcgccttgccgttcaccgtgtcggcttcgatgatgatgttggcggcggaatcgtcgatgacggcccagccatcgcgcgagatcacgccgttgtcaagctcgatggcgccgtccgcctcgtccagcgtgcgggcggcgcctttgaggttgccgcgctgggcgtcgccgtaatgccaggtgttgaactgggtgtcggccacgcctttgacgaccacgctcaggccttccttgctgaacggctgctggtcgtagacgatggtcagggccgcggtgtcgatgatgacgcggccgtcacgctcggtgacgcggcgttcgaccgggctaccgaaatcgcggttcaggacggtctgggtcgggcggttctcgaatacgccggaatcggaccattcgaatcgcacgagcgaatcggtgatgagtccgatgcgccagtgctcgccggacaccacattgtcggcgcgcatggccggcgtggcgtcgaggcggaagtcctgcggatcgggcgaggtcggagacgactgcttgagttgtggtgactgtgccatggttaccccttctgtacggttattcacgatgatacgagtgatgcggccgcggctccccgggactggtgggagactgcggcgcggttcggattcggccgaaaccggccgggtttacttgcccgagccggtggcgatgccggcgatgaactgcttctggaacaccaggtagacgatgaccaccgggatgatggtcacggaggtggcggcgaacagtccgccgtaatcggtgccgtactggccggagaacatcttgaggcccaccgacaacagctgcttgtcgtcatcggtgatcatgaggaacggccagaggtagtcctcccagttccacaggaaggtgaagatggcgagcgcggcgatggaattgcggctcatcggcagcaccacctggtggaagatgcgccagtcgctggcgccgtcgaggcggacggcgtgcgggcggagcagggcatcctcggagttgtggacgttgaacagcacgggggcgttcttgttgcccttgagcgagagcggggtcttgacccagtagtcgctccaagccacctgcgagatcttgaaggtgacgttcgggtggctcttctcgtactcgtggagcatggagatcaccgggtcagtgctttcgtcgccccaggaccagtagcccagttcgatgggctggccgtcgttgaccaagtggttggggtcgtaggtgatggtgtcgcccatgacggccaggcccttgtcggcctgggtgtcgacgacgcctgacgaaccgctcgaactgcaaccggttgcaagtgccataatgctcacggttgcagtcagcgcggcgagagatttcttgatcttcattatctcccttacttcctcgcaagctctaagtgaaaacggttcagtatacgggtgtcgaactagttcggcaacccggctttctcagccatgcaaaccgttacatttgcaacctgttacattccaaagctattgagaccatattggtctatattttcggcgtgtcgcaatatcgcaacccattgcactatgactgtcgtaaaacgtactgcaatgatttacaatgaagagaagtttgtcacaccgtcaactttgaaaaaccgggaggggccatgaaagccagcatcgaggacgtcgccaggcaagcaggcgtctccaccgccacggtctcccgcgcgttctcccgccctgacatggtctccgccaaaacgcgcgccaaggtgatggaggccgcccaacaactcgacttctcggtatcccgcatggccggcatcctcaaatcgggccgctcccaccgcgtggcgctgctggtgggcagcagcaagctcgactggttcacctcgcgcatcatcgaaggcctcaacgaagtgctgcgatcggccggctacgatctggtcatccaaccgatcggcgatgcgggcgcgcgcgaggagttcttcgacgaactgccggtgcgcggcaacgcggacgcggtcatcgtctcgtcgttcgccatcaccccggccgaaatcaggcgactcaacaccacgcggatcccgctcatcggcatcaacacggcctcgcaggggttcaccgcctccgtgggcatcgacgacaaggccggcatccggctgatcgtgcgccatctgaccacgctcggccaccgcaacctgttgtatttgtacgagacgttcgatgccacgatgggcttcagctcgcacaaccgcgtcaccggattcctggaggcgtgcagcgaactggacggcgtgaccggccagacgatggacatgcaggccggcgacgatccggtcgacgccgccctcaccgcgctgctcgcgcgcgacgacgccccgactgccctgtgcttccatcaggattcgctggcgattccgctgttcttccgcctgcgccaatgcggcatggcgattccgaccgacctgtccgtcaccggattcgacaacagcacgttctcgggcgaggtggggctgaccaccgtgcgccagaagccgtacgacatggccgtcgccgccgcgcgcaaggccctggaccttatcgaggggcgcaccctggaccagccgcacgagatcttccccgtgcaactgctggtacgcgactccaccgccgcgccgcgggtgcgcggctgagcggggccgaatcagtcgttattcgggccgctgttgtcggactgggctttgccgttcctgcgagctatcgccatgaacgtgacgccgacgatgacgggcaggaggatggcggcgagcgttgcggcgcggcggatggcatcggacgttgcctttccggacttggcgtcgcctgacttggcggacgctgcggaatcggcggacttggcggcggtgtcatcgcccttatgcggtgtttcgccggtgaaccaggcgggatcggacggatcgtatttccgggtgccggcccagtttgcgggcgtcgcgccggcgtatagggcgacggccgagcccttggccacggtggcggtgaaggtgccggccacggcgttgcggaagccgatcatgccgcggatggcggtccagcgttgcgcgcagtgccaggtgccggcggtttcgatgccgtcggtcggacaggtcatgtccggcacggaggtgcgggtggcgccgggagcgccgtcgtcgacgccggcgtagtagtagccggagaagatgtgcggctggccgtaatcgtaggcgagcatgaaggcgttggcgagcaggtagctggtgccgtcacgggtggtgagcgaggagccgttgcgctcggtgtcccagttggtcacccatacggccgccttatcggaatccacccaggtcggtccgccgatggcgtccaggccatccgaacgaatcgatgcaggccggcttcgacatggacctctacctcgactggcgccgggacggccacccgaacggctacaacctgttgctgcgcaataccgacacgcctatggagcacgaaggcgattccagttatttcaacgccgattcaggtgcctcaatcgcctcattcctcacggaatacctgccggacgagctctcttccgacgccgacgtgctgctcagtcttggtgaaccggccgtgagcggcgggcagctgacgctctccccgcaatcgttcgtcgtgtttggttaaacccgttcgacctcacctccgccggcgaggctgtcggcaaagtcgactggggatagtcaacgggccatcacgacaaacaccaacacctctagcctcgtccaactcaccgaatgtattgcaatcgttgtcaatatgagttacggtagaggcagaacagctcgaacattggtctgtcaggttgccggaacctcaacgcagagcggccctcgaacagcaatgcaaacgactagcagtacccgatttgcaagcaaggagtcatcatgaccgacgcatacggcaacgacgcagcaaccagcaccggcaccatcgcagacaccaccaacaacgccgcttccggtgccccgcagcgcgcggaaagcacggaacgactcgcccgcccgctcatcaagctcgccaaagcctgcggacttgccacctcattcatcgaccagctcggcacctacaccgaaatcagcgacgcggccttggtcgccgtactcaaggccctcgacgtggacgcatccagcgacgaggccatcgtacgctccacgacccaacttgaggtggaaaacagcaaacgtttgctcccctccaccatcgtcgccaccaccggcaaaccgaccggcatcaccctgaactgctcgtcggacgcggacatcaccgcctccatcgaactggaggacggcaccgcgtttggccactttgccctgctgccgaacctcaattccggcaagccggacttgaccatcgcacccgacctgccgatgggttaccacacgctgaccgtcacggttgacgggcgcgagggcaaggcggccatcatcgccgcccccgcgcgcattcccgtgccggaggcggtcgccgagcaccagcggtggggctggatgacgcagatgtattccgtgcggtcccgcgaatcgtggggcatcggcgattacggcgatctgaagcgtcttttggcagatgccgccgagaagtccaaggccgacttcatgctcatcaatccgattcacgccggcgcgccgattccgccgcttgagccatcgccgtatctaccggaatcgcgccgattcctcaacgtgacgtacatccggccgcaggatatccccgaatatgccacactgccggccgacgtgcgcgcgcaggtggatgcgctgcatgattcggtggccgcgcgcaacgacgaatcgaccccgatggacatcaacgcggcgtgggaggccaagcgcccggcgctgcgcctgatcttcgaagcgggccgcaacaacaagcgcgagctcgaattcgagcatttcaagaccaccgccggcccggacctcgattccttcgccacatggtgcctgtgcttcgaggtatggggcgcgccgtggggcgagaaccgttggttcttcgagaagaccatcgacgacccggccgtgcgccagctcgtcgaggagcaccacgacctgttcgagttcaaccgctggctgcagtggatcgctgccgagcaggtgaacgccgcgcagcaggaggcgctggaccacggcatgacgctggggctgatgcaggacatggccgtgggcgtgcacgggctcggcgcggatgcctgggccaatccggaacgcttcgcctcaggtggcgtcacggtcggctgcccgccggacttctataaccagcagggccaggattggggccagccaccgttcaacccgcgctacctggaggccaccggctaccaggtgtaccgcgagatggtgcattcgatgtacgagcacgcgggcgcggtgcgcatcgaccatgtgctgggcttgttccgcctgtggtggattccgcaggggctcggtgcccgcaacggcgcatacgtgacgtacaaccacgaggcgatgttgggagtactggccatcgaggccacgcgcgccggaggcatggtggttggcgaggatctgggcaccgtaccggattacgtgcgccgcattctggccgatcacggcgtgctcggcactgacgtggaatggttcaaccgcgtggacgattcgccgaacgccggcgacccgtaccgcgcacccaaggactatcgcaaacaggcattggcctcggtgaccacgcacgatctgccacccaccgccggctacctgaacttcgcacacgtcaagctgcgcgaggagctgcatctcctgagcgagccggtggaggcattcgccgcctcggcgatggccgagcgcacggccatgatgaaccgtctggtggagaacggctatatctcgcagaccgtggcggatgatgtggaaggccatgtgcaggaaatcgtggaagcgatgcacgccatgctcaccgatacgccgtcgctgctgctgcaggcagcgctggtggacggcgtgggcgaatgccgctcccagaatcagccgggcacttccagagagtattcgaactggcgcgtgccgctggcggacagctcaggccacgtggtacataccgacgaggtcttcgacctgccacgcgtgcagtccctagccgccgtgatgcgccgagagaagcggtgatcgattccggcaatgggaaattggtctaaatcagcccctcgtaatcgagatagccgaagacgacgacttgttatgggcatgttatcgttgtcatgacaatgattgttcgcgacggcgaaggagcgacggctatgaccaaggcaagcattcaagcggtggcccgcgaggccggcgtttccgtatccacggtgtcccgaaccttcgccaagccggatctagtgcttccagagactcgagaccgagtgatgaccgcggccgaaaagctcgactactccgtctctcgctcggccgccgcactgaagtccggccagtcgttccgcattgcgctgctggccagcgagaccatcaccacctggttcaatgcaaacatcttcgccggccttgactcggcgctgcgcccctccggctacgacactgtgccctaccccatgcgcaacgccgccgagcgccatgacttctttgcggatttgcccgtgcgacgcaatgcggatgcggtgattgtcagctccttcgacattgagccggctgaagtggagcgactgaagcatatgcacgtgccgattgtcggcatcaacattccctccaccgatgggttcgacgcaggcgtgagcattgacgattacgccgccacacgttcggccatcgagcacctgattgcactcggccaccggcatatcgcgttcgtcggcagcgccccgaccgaaaccaacatgcgctacagtgccgaggctcgtttgcagggcgtcattgatgccgctgccgcccatccggggatcgagctaacgcccctgagcattcaacgcggtcttggcgaaagcaacgcggcattgaacgccgtactgaacgcctcccccagcatcaccgccttctgttttgaggatgatgaaatggccgcacccgtgctgtatcgcctgcgtcaatacgggcggcgggtacctcaggacatctccatcatcggcttcgacgattccaccctgtccgccgccgtgggactgaccacactgcatcaggacccgttcgcaatgggcgtggccgccgggcacatggtattggatgccattgcgggcaagtcaatcgaaccggcattcgtacggccggacactccgctaatactgcgcgaaaccaccgcgccgcctgccgcaacagcagcgtccgcgcaggcgtgactacgttaccaccgcaaaacgccgataaatcgacttttgcatgcgtaattcacatgatatcgttgtcatcatcaatacaacggttgggccttcacacagcagttcgagcacaaccggaacaacccaaccacaacgcacccggaacaggaaggaatcggcatgaccgccaacaacctcaatgacgactggtggaagcaggccgtcgtctaccagatctacccgcgcagcttcaaggacgtcaacggcgacggactcggcgacatcgccggcgtcaccgagaagatggattacctgaagaacctcggcgtcgacgcgatctggctctccccgttctacccctcggatctggcggacggcggctacgacgtgatcgactaccgcaacgtcgacccgcgcctaggcaccatggacgacttcgacgcgatggccgaggccgcgcacgaggccggcatcaaagtgatcgtggacatcgtgcccaaccacaccgccgacaagcacgtgttcttccaagaggccctcgccgccgagcccggctccccggcgcgcgaccgctacatcttccgcgacggccgcggcgagcacggcgaactgccgcccaacgactggcaatccttcttcggcggcccggcctgggcgcgcgtggccgacggccagtggtatctgcacctgttcgataaggcgcagccggacgtcaactggaagaatccggacatccacgaggagttcaagaagaccctacgcttctggtccgaccacggcaccgacggcttccgcatcgacgtggcgcacggcctggccaaggatctcgaatccaagccgttggaagagctcggccgcgaatacagcgtggtcggcgtgctgaatcatgacttcagccacccgctgttcgaccgtcgtgaggtgcacgacatctaccgcgagtggcgcaaggtgttcaacgaatacaacccgccgcgctttgccgtggccgaggcgtgggtggtgcctgagcaccagcacctgtacgcttcgatggacgagctgggccagtccttcaacttcgacttcgcgcaggccaactggtatgccgacgagttccgcaaggccatcgccgcgggtcttaaggcggcggccgaaaccggcggctccaccaccacgtgggtcatgaacaatcacgacgtgccgcgcagcccctcccgctacggtctgccgcaggtcaagggcgcgccctaccaccagctgccgcacgactggctgctgcgcaacggcaccacatatcccgaagaccgcgagctcggcacccgccgtgcccgtgccgccgcgctgatggagctcggcctgcccggtgccgcatacatctatcagggcgaggaactgggcctgtttgaggtggccgatattccgtgggatcacttggaggatccgaccgccttccacaccacccgcaacacgatggacaagggccgcgacggctgccgcgtgccgctgccgtggaccgccgccgatgagccggccttggccgatttcagccgtccggctccggccgatgacggtaccggcgaaaaccatgtgccgctgtgcgcagccggccagttcggcacgggcgcttccttcggcttctcgccggctacgcgcgctgagggcgtgacgccggccgccgacccgcacctgccgcaaccgctgtggttcaaggattacgcggtggacgtggagcaagccgacccggactcgatgctcgcgctgtatcgcgccgcactggcgattcgccaggagtcgctgaccgccacgcgcgacaccacggccgagcaggtggacatgggcgacgatgtggtggcgtacacccgcgcggcggttggcgggcgggtgttcacctcaatcaccaacttcggcaatgccccggtcgcgctgcccgatggctccgtggtgctggcgtccggcccgctgacccccgaaggccagctccccaccgacacttctgcgtgggttatcaagtagatcccttggaataagcgaaaggccgccgttccgaatgaatcggagcggcggccttttggtatgcactggggaccaccctcaggcgcttacgcgccagcgtactgcaacacggacagcctgaaggctgcgattgccggctcgctgttcgtgcgcacctcacccgaggggagccaaggaagaatcactgaacctgggcgcgggcgatcttgccggtgaaggagttggcctcgtcggcatccttgacgccatccttgttccaggagaacatggcgcgcagcttcgggccgacggtctcgatgcgctcgttggagtacttctcctgcagttccttgaagtgcggggcgccggcatcctgatcgtcgatgaactccttggcgaaggagccgtcctggatgcgctgcaggtggtattccatgcgcttgcggcagtcctcgttgatgacggtgttgacgtagtcgccgtactgggcggtgtcggagcaggaccaacgagccttgttcaggccgccctcgttcatcagatcgacgagcatcttgagctcgtggcagacctcgaagtaggcgatctccggctggtagccggcgtcggtcaggacttcgaagcccatctcgacgagcttgttcacaccgcccatgagcacgttctgctcgccgaagagatcggtctcggtctcttccttgaaggtggtcttgatggcaccggcgcgcagagcaccgagggccttggcgtaggccagggtcagagcccaaccatcgccacgcggatcctgctcgacggccacgacgaccggcacgccacggccagcggcgtactcacgacgaacgatgtgacccgggcccttcggggcaaccatgaacaccgggtgatcctcagacggcttgatgtagccgtagtgaatgttgaagccgtgggcgaacgcaacagcagcacccggcttgatgttgggctcgatgtcgttggcccagatggtgcgctggtactggtcgggggccaggatcatgatcacgtcggcctcggcggaagcctcggccacggacttgacctcgaggccctgctccttggcgaagtcgaccgacttggaggtcggacgcaggccgacgaccacgtcgacaccggaatcgcgaaggttcagcgcgtgggcgtggccctgggagccgtagccgatgattgcgactttcttgccttcgaggacggaaagatcgccgtcgttctcataccagatttgtgctgccattattggcactccttttcagtagtggggtgtggcgccgctgggcgccggggtatctacggtgtgcagataagtcctgtgttgcgaggattgtgtccttcaaaccgaaatcaatcctaccgagaacgccgtcgcagccccgctggagtccacaacgtgagctaggtcactattggagtatggacagccgtgtgcagagaacgattctcgataacaactctgcacccttttgaacagaatcgcacaatcccacatatggggaaaggctgagatatcaacgaccttgcatattcggtgttcgtttgcctgcaagaaatcagcgcatagttgttattgagaatgattcgctgcgcgcaacaacacaaaaccgccgctcccgtatgggcgggaacggcggtttgctagcttaaatccccttcaggggcggcaatcactgaacctgggtacgagcaatcttgccgttgaaggactcggtctcatccttgtccttggcctcggcgttattccaggagaacatggcgcgcagcttcgggccaacggtctcgaggtgcgggtgagagtactcttcctgcagcttcttgaacttcggggcgccagcagcctggtcatccatgaactccttggcgaaggagccatcctgaatgcgcttgagctgatactgcatgcgcttcttggtctcctcggtgatgacggtggaggtgtagtcgccgtactgagcggtgtcagagcaggaccaacgagccttgttcagaccaccctcgttagcgaggtcgaccagcatcttcagctcgtggaacacctcgaagtaggcgatttccggctggtagccagcctcggtcagcacgtcgaagccgaggtcgcacaggtggttgatgccgcccatgaggacgtcctgctcaccgaacagatcggtctcggtctcctcggtgaaggtggtcttgatggcgcctgcacgcagagcgcccagagccttggcgtaagccaggcacagcggccaggtcttgccgtccgggtcctgctcaacagcaacgacgaccgggacaccacggccagcggcgtactcacgacgaacgatgtggcccgggcccttcggggcaaccatgaacaccgggtgatcctcagacggcttgatgtaaccgtagtggatgttgaagccgtgggcgaaggccagggcagcgcccggcttcaggttcggctcaacgtccttcttgtagacggctgcctggtactggtcaggcagaagaatcatcacaacgtcagcctcagcgacggcctcaccaaccggtttgacctcaaggccctgctccttggcgaactccacggacttggaggtaggacgcaggccgacgaccacgtcgacaccggagtcacgcaggttcagcgcgtgggcgtgaccctgagaaccgtagcccaggatagccaccttcttgccatcgaacacggacagatcggcgtccttctcgtaccagatagttgctgccatttttggcgctccttttatttatttgtttatttatggggttgaatttttcttgcgttctgcggggtttcgctgagcgatattctgttgtggctttccttgtgggcttttccgatatgcaggtttagtcccgtcgcatcggaaaagccctgtaggggttcacttagtggaattaggggttttcacgttgtgaacatcgtcacttggtaaagtcaacgtccttagtctccttgcaggtgagcacggagacgaggcagcacacggccatcacggcaaggtagaggcccacggagtggacgccccagtgggagctcagccaagtggcgatggtcggcacgaaagccgcgccgacgatggcggccaggttgtagccgatgccggagccggagtaacgcacgttggcgtcgaacagctcaggcaggaaggcgccgatcgggccgaaggcgatgcccatcagggcaaagccgacgcacaggaacaccatgttggcgaagaagttcttctggccgaccagaccaccgtccagcaggaacgggaagagtacggcgaacaccacaagtgcgcaggaggagaaggtcagcacgcgacggcggccgatcttgtccgcgtacaggcaggacagcacgatgaacagggcgaacacgcagatggagatcatgagcatgagcaggtattcctggttggtgaagccaaggttgccgccgccttcgccctgctccttggtgccccaagcgagggaccaggtggcgagcgtgtagaacagcgtgtaggtcacagccacaaggaaggtggcctgcagcacctgacgccaagacttgcggaagacctcggtcagcggggacttgacaaccttcttctgctcctgagccatacggaagatcggggtctcctccatgtgaacgcggaccacgagaccgacgatcaccaggatggcggacagcaggaacggcacacgccagccccaagccagcatcgcgtcctgattgttgaaggattcgagcacgaagtaggtgccgttggacaggaagaagccgatcggggcgccgagctccgggaaggagccgtacagtgcgcgcttgtcttcaggcgcgttctcggtggcgaccagtgccgcgccggaccattcgccgcccaggccgatgccctggatgaaacgcagcaggcagaggatggcgactgcaccaacgccgacctgatcgtaggtgggcaggcagccaatcaggaaggtgccgacacccatggtcatcaggctgacgaccagcgtggtcttgcggcccatgcgatcgccgaagtggccgaagatcagcgagcccagcgggcgggcgatgaaggcgacggcgaaggtcagcaagctcatcagcagtgcgacggtggggttgtccttcgcggagaagaagatgtgcgggaagtagtttgccgcggcggtgccgtaggcgtagaagtcatagaattcgatggcggtaccgaccatcgacgcggcgatcacggtcttgaccgaatcgcgtaccaaggtagcggctttacctgccgcctgccctaagccagtctcttcgactgctgcagtcattgttactcctgttttgctctcgttcactctcatcggcgggcgattatttcgccccacagggaggttgttgttctgtcgctgtgttgttgccgtgtactgtccgctaccgtttccgtctgcgggattctgccgtaagccttgtgagcgcaacaaaaaaagccccgcatcatgcagggccgtgccgattgtgtcagcttgattggccctgccttcgttgacggggcttcaagcatcagtgccgaattagtccgccagcgaagacgggctaataattcgtgcggatacaaacgcagaagcattgaatccagtcatcgcgtggcctcctttcggtatttcctcaggccgttcgacctgaactggaatgtaaacataggtttgtatgtcttgccaatccagcaagggttcacattgtggacattgtgacgtaggagtcatgtgagatgggtgactgtgggcggccgtgactcggctcccctcagtcgcctacgccgccagctcggccgcaattacagacgggctaccgcccgcagtctgcctgctcgcctcccggctcgccttcgcctacaaacagtccaccggactgtttgcttcacagctcagcctcagagaggggagccaagataggagtcaccgggtggtttcgccggggatgagggctacggggatgacttcttcgggagtgggttgggtgtcaacgtccgaagcgctatcgttcttggacggagaggcggggccaccgtcggcggcgatctgtgagtccatgcggacggcgagcgcggcggcgatggccgggaagtcctgtcgaatcgcggtcaggcgtttgccggcggtttcggccatgagagtgccgtcataggcgatgacttgcagatcagcaggcacctcgataccccgtcgtgaggcttcctgcaatgccacggatgccaccacatcggagccgacgatggcgtcgacatcaggatactgttcgaaaatggcgcatgcggtggcttcgtgggcggcgatgtcggccacggcgccggcttccacgtaatcgcaggcaatgccggcatcggccagcagacgctcgacggtgagatggtagcgaatcgtggggaacgtggtggccgcagcgaactgggagcgcgggccgccgacgagcaccacgtggcgcgctccggaatcgatgagctggcgagcaatcagacggcctccctgttcatgatcagaccggacgaccggcacaccctcaccgagcgtgcggtcgaaagcgacaattggccgatggatggaggtccagtagtcggccggatgctcggtgtgggcggccatgataataccgtccatcatgtgccgctgcagcatatcgacgtattcgccctcgcctttgtccgcatcggcggtggaacacaatagggttttgaggtcgcgcgcggcgaactcgcgctgcagatgcgcggtgagtgtggagaagaacgggtgggcgatggtcggtatgatcacgccgatggtgttggtgcggttccggtagaggttgcgggccagctcgttgggaatgtagttgagctggcgcatcgcggactcgactttggcacgcatatcggccgagacgtagccggtgttgttgaccaccaacgaaacggtgcttaaggacacccctgccgctttggctacgtcgcgcatgccgaccatggttttgctcccctgcgagtactggactggatcactgctgaccagtgtactcgaaccggtttattattcggcagatttggtggtgagggtgacgattccggccagcagcaccatgacgatggcggacgggaagagcaggtaatagccgaagctatgctcgaaggcgttcaccagtagcgcgccgatgatggcggcgagcgccagaccggccgagttggcgagcgcataaatgccgaggtcgtggccggctcggcgcgggtcgggcaaagagtccatcaccagttcaagtccgagcgaatcatagacgccaaaggcgaatccggaaatcaacgcaaacagcagcatgccgttttcacgggcagtgccggtggaccagacgccaaggccccatgcgagcgccaaaccagcggcatacagcaggcaggcaccggccaccacacgggccacgggaatgttcttttcctcgattcgctcggaaatcggcccggcggcccaggaggcgagcgcggcaccgatcaatgtggccacagccataccggcaatgaggaatccggccggaatggtcagcggcgcggacgtaagtaccacggccttgccataaacccagaaacgtacgagataccacagaaacacaccggtcagcccaacaccggccatcatgcacgtacgggcggcgaacacccgggagaactcgggagcgtgggccggcgggcgcaattggtcaagtacctgactgcggtcaaaaagctggttcggctgctcagcgctagaaggctccttgggcagaatcaatacggtggcaataccggacactgcaaatagcacggcggtgtaactaaacggcgcaaacgaattgaacatcacaccaagcgcacccatgcacacgccaagcgcttggccgagcatcacaccgatgccatgccagcgttcgatgcgagggcggaacttgtcgggcacccgttcgctgatggcgctggtcaacggcacggaaagcatcgcataggcgaactgtaggaacacccagaaaatacaaagcacaatgatgccgatattctgccccagaatcagcgtgatcagcgcgcacagcagacctccgccaaccatccacggggtacgacggcccaatggcgtgcgtgtgcggtcggacaacactgaaatcagcggcatcgcaaacatggaggccactacgccgacaatcaccaacacggccaggggcatcgccaattcggtggcgacgggcaacgggcggccagtggccggattgatggcgatatgaccggcaacagcagtgtcatagccgaacgtacgcgcaatcgcgttgggcatggcaatggtgttcaacgccacccaaggtgcgccgaccagaattgaagcagcgaagaaaccccagttgagtcgggagacctgacctgcggtagggcgttggccattgacggcgaccatgggatcgcgcatgtcgaggtaggcggacgacatatccggcgcgggagtgtccacactggcggctgcagcagcggctgccgaagaaccggcggaagccaatcgcacagcctgggcctcaggctggtccgcagaggcttcgggcgggcggcggcgattcttgatggccagtctggccacggcggctttgtcttcgggacttaggaccttgtccaaatccgggcgatcatcaatacccggacgcacatacggttccaacatgatgctgctctttctctgttctgctgctcgtctcgtcgattccggcgggatgcttgggccgcgcccgcaggagcatgaccttcaaccccgcatacgcaaaaccgcccgggcgcactggcttcagtgcactgcgggcggtttgctctccatgaacccagcttacgccgggcgcactacttggagcgcgcacagcggagtggcgtttatgggccaacggttagtcgatatcggcaatcggcgggttggcgagcagatcgcgggtttcgtggtcgccggcggcatcgctccaggcaaggctggcaaccggggtggtgttgtctgtgccgaggccgcgtccgggctcgaaggtgagggcggccgtggacgtgccgtcggcggcggtccagcggaaggtgatggacgtgtcgccatcgacctcgtagctgaactcgccatcgaatgcaggcagttcgttgcggaacttggccagggcgttcagggccttgaccaccgggcgttcgaggttttcatcgatttcggcggtggagtagtagtggcggttgatgtcgcggccgttgttggtgcggcgcagcagttccatgtcgttgcggccggcgagcgcgcccacgtagtagacctgcggcacgcccggcaggaagaactgcacggcgcgggcggccaagtagtgctggtcgttgcagccgagggccgagtagtacgtggagttgacctggtagaggtcgaggttggacgcggcggcaccggtggcggcctgggattcgccgtgggtgttggcatggatggtgttgaccaggttgtcgacgtcctcgtcgggcacgaggcccttgagggagcggtcgagctggtcggagccgatgtcgatcacgccgatgccatcgtgcgtatcgagcacggtgacggcgttgttcgggcggatttcggtccagtggaccacgggttccacgtgaccggtgaacagcgagtgcaggagcagcggaggcagggcgaagtcgtagacgcggtccaccttggaggcgatttcaacctgcttcttgtagtagctatgcacctcaatgagaatttcgaggcctcgcttgacgccttcctcgcgtaggcgggagatgagcttgaacgtcttcggagtcatgaagcagctggtgccggcttccttggcgccgtagcccacggcgtcgagacggatgtagcgcacgtggctggcggccatctgatcgaagatcgacatcaggtattcccaacccttggcggaatcagtgtcgatgtccacctgctgcggggtgaagctcacccagaccaagcgcgtcttgccggcgaacttgtagtgggtgaacggcaggcccgggcgcgggcggtagatgccggccaggtcttcttcggtggcgccgttcgggaagacggagctcatggtcaggaacatcgggtaatactcggattcctcacctttttcaagcacgtcttggaactgcttggattcccaactcatgtggttgacgatggcgtcgaccatgatgttgtgggtcttggagagttcggcgacgtcgtcccagctgccgagacgttcgtcgactttggtatggtcgatcgggtcgaagcctgcatccgcaccatcgaacggagtgaagaacggcaggatatgcacgccgtcatacacgccgtcgaagcgggtgcgcaggatgtcggtcatcgagctaagagtgccatcgccgagacgatcggcgtatgtgatgagttgcactttgtttttcatgggacctcccttggctcatgggcgcgggtgcaatttgcgtgcgcatctgcctgtttgttgtttacgtatttgcatactcacgtatgtatcgaaccggttcgatattacctcgaaagggacgtcaatgtccagtcgcgcagtgaaatgcgcgtgtcgaaccgattagatgcggtgttctatgcagcttagcctgtccgactttccgtccgcatcccccaaccttctataattgagcattatgacctccacaccttctgttcacgacgtcgcgattcgtgcgaatgtctccgcgtccacggtttcgcgcgccttcacacggccggagcttgtctccgaaaaaactcgaaacagagtgttgcaagccgcctccgagctcaatttctccgtttccagatcatcgatggcgctcaagtccgggcagagcttccgtatcgcgctactgctgagcaccccggtcacgacatggttcggaggcaacatcttcgaagggctcgacatggtctttcatcccgccggctatgatatctccatctaccccatcaacaatgtaaaaagcagggcggatttctttgacgttctgccggcgcgacgcaatgcggacgcagtgatagtcccctcgttcaacgtggattccagagaggtcgcgcgcctgaaaacgatgaatgtgcccattgcgggcatcaacaccgtctccaacgaaaacatgtcggtatgggcggccatcgacgatgcgcatggactgcggcttatcgtccggcatctggtgtccctgaggcatcgccgcatcacatacgtgtgcagggacccgcaatcgttgctgacattaagtgcggctcagcgcatcaggggattcaaggaggcctgcgcgcaggcccatatcaaagacgacgttctggttattccggacggagacgattcgttgcagtcgaccttcaacgcattgatcaatatgcagcccatgcccaccgcgatctgctgccaagaggacggcatcgccataccattgatgtgccgtttacgggaattcgggttgaagattcccggcgacatctcgatcaccggtttcgatgacggaacctactcgcaggaattgggactgaccaccatacgccagcagccgcgattgatggggcacgacgtcgcggaaaaactgctcgatcttatcaatcataagacgatttccgaaccgtaccgaacctatccggccgagctgatcatccgatccaccaccgcgactccgcgggacgtcgacgaataggcgccgaataggggaagcggggccgtagagaggatacggccccgcttcggggatggggaggaggaacgatttactgctcgtcgccattcaacgtggtggcctccggcagcacaccgttggtgtcctcgaaggtcttccactccttggcccagccattggtgtatgcgtcggcgacggcgtcccacttcccggtttggttgacgtactccacaagagcgtcctgcacgtctgcaccccaggcgtcaagcgtggagaagctcctcaccatcggaacgccattcgtctcgtacttacgggcggcggcggtcagcgggttgtcgggctgatccttatctccgtacgcggtgctcggcacggcgaagcccatatcctgagacatgaccttcttgccttcgtcgctgctgaacagccactcgatgaagtcgaaggtcgcctgcttgtccttctcgctggcgttcttgttcacggcccaggacgcgtcgtagatgccagcggggccgtacttctcctcgccggggatacccatgaaatacggcagcatgcccagatccttatcggcgacctcgttgtccttgacctgcgtgtaggcccatacgccgttcgggtagaaggccacctctcccagcgagaactccgcggtcacgtcctcatacgtcttggaggtcaacagcgtgcgcgaggtcggacagttgttcatctccaagtcgaacagggccttgtagttgtccacgtacgtgcccttgatctcaggcatgaacgtggtgttgttgtccttatattcgtagaacagcggaatacgcgtcatatgggatgcgaaccggtacaggtccgaagattcgagtccgggggtcgccatggcgccttcgatgccgagatcgtccttatgggcctgcatgtcctccaccacggccttgaacgtatcccagtccttgatatcgtcggcggagtcgatgaccgcatagtccttcgaggcgtagtcgttgacgatcttcttgttatagatgatgccgaaccattccgcggcgtacggcaacgtgtagtggctgccgtcggcttgatacgagttggccttgccctcgtcggtcagcagcttgaaggcggcggagtcctggaccggctccatgtagtccttccacttgatgaaattggggtagccggtgatgctccacatcgtcggggcttcggtcttggccaactcggaggccagcgtattgtcgtagccgtcggcggccgtgagcaccttgacctgcacgcccgtctccttggtgtactgatcggcgagatcctccaactggtcgacgatctccttcttgttgttcacgaagtagaccttgcctttgtccggatcggccgccgacgaggatccgcaccccgccatcgcgcccatcgccatgacggccgcggcgacgatcgccatcattttcttggttttcatggttctttcctttccttgatgaaccgattggttcttgaaatgattggggctcagcccttgaccgccccagcggtgacgcccttgatgatgtacttctgtccgcacaggtagaacaccaggatgggcagcagcgccagtaccagagcgcccatcatcgcgcccatgtccacggatccgtatccgcccttcaggtactggatggcgatggacagcgtcttgaaccgttgaagatccaggcacagataggccatcaggaagtcgttccacacccacatcgtctccaggatcgccacggagataagagccggacgcatcatcggcaggacgatggtgaagaacgtgcggatggagccggcgccatcgatcatggccgcctcctcgatctccgagggaatcgacttaatcacgccggtgaagatgaacaccggcaatcccgcgccgaatcccagatacaccagccacatgccccacggcgtgttgaggtccaatgtgtcggtgagcttgctgagggggaacatgaccatctggaagggcaccaccatgcttgcgataaacgcgagatacataagcttggcgacccagttgttgaccctgacgatccaccatgcgcacatggagcagcacagcaggatcagcgccacggacccaagcgtaagtataatcgtccatccgaagctcggaaggatattcgtcttttctatgccgcgctcgtaattctccaacccgacgaatgtgtcgccggtcggcaggctgaacacgtccttggagatgtagacgcgctttttgaaggagttgatgaagaccagcgcgatcggatagatccatatcagcgagatgatggcgaaaatggtcgtccacagcggcccgtgcctgagtttgtcggtcatgcctcgacctccttgctggtcgtaatgcggttctggatgaatgcgaccacagccacgatgatgaagaagatgacggccttcgcctgcgcgacgccctcgaatccggtgcggccgtacatggtgcggtagatgttgaacgcgatcatttcggatgcgtttgacggcgcgccgttggtcagggccaggttctggtcgaacatcttgaatccgttggccaccgtcaggaagctgcacaccgtcaccgacggcatcatcagcgggatgatgatcctgcgcataatctgaccgttcgatgcgccatcgacctgcgcggcctcgatcagatcagtcggcaggctttggaagcctgcaatgtagatgaccatcatatagccaatctgctgccagcacagcagaatgaccatgccccagaagccatagaccgccgacgtggtcagggaacggtcccacagcgcgaggacgccgttcaacagcagctgccagatatagcccagcacgatgccgccgatgaggttcggcatgaagaacaccgagcggaacagattcgccccgcgcatcgccttggtgaacatataggccagcaggaacgcgacgacattgacgacgatggtcgtcacgatggtgaacagcaccgaccgccacagcgcggctccgaattcgggatccgaaagcgcatccacataattcttcagccccacccacttggcatcggtcaccgtcctgaacgaggtaaagctcaggtagatacccatggcaagcggcacgacgaagaacaccgcgaaacacaacactgtaggtagtgcgaagagcgcccaccctctgcgcaccacttttccgacagtggtcattgtctgcatctcctctccgagatcgatatctgcagaagattcattcttgaatccatgcgcagcgtcatattgcaacgaagaccgaaatcttcttgtcttgaaaatagcatattttgcacacggttgcaaactctctttgaaaaatgctatgttattagcacagaatcactgaaaacacaggagtgcatccgtatgaatacccaacctttcacgaacagcaaaggcgtcatttcagggaactgctggagaatcggagtcctctccgattcgctgctacgactggaatggtcagacaccggcgagttcaacgatgatgcgacgctcatggccgtcaaccgcgatttcggcacacccccggaatattccacctcgatcgccgacggtctgctgaccgtggaaacgaccgcgctacgtctgacctacgacatgcggcccttcagcaaggagggactcagcatcgtggtcaaaggcgtgaaagacaccaaaaccaatacctggcatttcggcgatgcgcaggagggcaacatgaaaggcacggcccgcacgctcgattgggccgacggcgccattcccctgaacgatggcgtggtctcccgcgacggctggtcggttctcgacgattcgaacacctgcctattcgccgacaatggtgacatcaagccccggaagaacgccgggattgacctgtacttcttcgggcacggccaccgttatgccgatgcggtggccgatttctgccgtctttcgggaaggtcgccgctactcccccgatacgccttgggcaactggtggagtcgtttccaccgctacacaagcgaagagtatgtagcattgatggatcggttcaagtccgagggcatcccgttcaccacctcggtgatcgacatggactggcatctggtggacgacgtcgaccccaagtacggctccggctggaccggctacacctggaaccgcaagctgatccccgatccgcaacgttttctgggggatctgcacgagcgcggctgccacgtctccctgaacgtgcatccgcgcgacggcatccgcgcgttcgaggactgctatccttcagcggcgaaaacgatggggatttccccggacagcggcgagccggtcgagttcgacctgaccgacccgcgcttcgtcagggcctacttcgacatgcaccacgacctggaggccgacggcgtcgacttctggtggatcgactggcagcagggcggcgtgacccgccagcccggcctggacccgctgtgggtgctcaaccacatgcactactgcgattccgcgcgcgacggccgctggccgctgatcctctcccggttcgccggccccggctcgcagcggtatccggtcggcttctccggcgacacgatcgtgacctgggagtcgttgagattccagccgtatttcacggccaccgcgtcgaacatcggttacggctggtggagccatgacatcggcggccacatgttcggctaccgcgacgaggagctggaagcccgctggtaccagctgggcgtgttcagcccgatcaaccgcctgcattccagctgctcgccgttctccggcaaggaaccatggaacttccgcccggagatccgtgcgatcatggacgatgcgctccgcctgcgccatcgcatgattccgtacctccacaccatgaactggcgcgcatcccggacaggccttcccctggtggagcccatgtattggggatcgcccgacatcgacgccgcataccacgttcccaacgaatacatgttcggcaccgaactgctggccgcgcccatcacggaaccgatggataaatcctcccgacggggcaaggccgacgtatggctgccgcagggcgactggttcgacttcttcaccgggcgccggtatagcgcgtcttcgcccaacggacggcgcatgaccgtctggcgtccgctcgacggaattcccgtgttcgcgaaggccggcggcatcgtgccgatgcagcccctgtccgagggggattccatcaactccgtcgacaacccgcagcatctggagatcatcgtcttccccggagcggacggcgacttcacgctgatggaggattcgggacattactctcggcagatcaccccggcgaccaccgcgatcacctatcgatggcgcaaggacggcgccacatccgcactcacggtatcgccagcccagggagacgttcacgctctgccggcccggagaacatgggatttcctgttccgaggcattaccgacagcgacatatccgtacaggccgacggcgcatccgtcgattcggatcgccggtatgatgccgaaaccctcacattgcaggtaacggtcgccgacgtatccacccgcagcgagatacgtgtcaccatcggcgacacgacgatggcccccgatccccgcatggaagacgtcttcgacatccttcggcatgccgaaatgcgatatctgaccaaggaacaggcttatgccgccataacggagaacggcatcgacgcattggccacgatggattcactcgagcacgtcagcgggccggacatggaagattgctccgattcgcatatgccgagcgccgtccgtcaagcgctgacggaggtgctgctccgatcctagcccgcatgtcgcctctcccggaatacgccacgggagaggcgacagcagcccgtcacagacccatgtccaggcgaacgccgggccgtcaacacgtcgaggcacgacgcaccagatcgtaggaggtcacatacgtgcggaacggatccgccgacccctcgatgcgcgcgatcagcatatccacggcatgtcgcgcgtaatcatccacatgcgggtcgatcgtcgtcaatccgggcatgcagtactcggcatccggcacgttgtcgaacccaatgacctgcatatcctgcggcacgcgcacgccgcgccgctgcagctcatgaatcaccccgatggcgagcgcgtcgttcaggcacatgaccgcatccggacgcggcgcatccggatcgtccaacagccccgccaccgcatcgcggccgccggactgcacccaatccgcgttacggaccagccgccaatcgacctgcaggccacgctcctcatgggccaacacatagccgcgggtacgcatcgtgctggtggtttcgggccgcgactcgcggtcggcatccgggcatgcgttctccgcggtgccgccgatcaacgcgatcctacggcatcccgaatccagcagcgcccccaccgcggtgcgtacggcctccacgttcggcatcgtgacccaatcggccagtccctgcgtatcgtaatcgcccacaatcaccaacggatacggctggtgcagtatcgtgcgatccgtgatcggcgagcccatgaagaaaatccagccgtccgcggccagcttcttcgtctccgggatcgcctgcgccaagccgccggcgctgttgtaggtatcggtgatcaccgcgtacccgcgggaacgtgccgccgccacgatgctgtcggcgagatagggcatgaacggctggcagaaatcggtgatggccagtccgatgagcttcgtgccgccggttttcatggcgcgggcggacacgttaacgcggtatccgaggcgttcgatggcatcctggacacgctggcgcgtctccgggcgcatactgccggtgttgttcagcacattcgacaccgttttgatggagacgcccgtctcgcgcgccacgtcggtgatggtcacccgtttcgccacagcacccctctcgtcgcaccatcgggcatgttccgcacggttcaggcggaacgcccgtctgattccagcataacgcgttttccccggccggtccggtcccctccgcccggcccgggaagcaagggccgtgcgatccgtccttctccggaacggaccgcgcggcccatcgcgtcacttgatgtgcagggcggtccaactcaccggcggcagggagacgcggaccacgccggactcggcatcgtacatggccgacccgttggcgtgcggggtcacacggttctggtcgtagagcgtattcgcggcgaacagatcgtcgtcgtgcagcgtctgcgcctcgacggatgccggctgcgcgccgtcctgcagcctgatctcgaactcggcggtcgcctcgagcgaacggttcaccgcaaacacggcgagcgagccgtcggcgcagcgcacggccacggcgttcacgccgtcgacctcgccatagcgcggcgtatccacggtgccggcggacagcttcggctccagcacggtgccgcccttggccaggcgcgcggtcacggagaacgggtggaacgtggtctggcgccaggccgggccgcccggctccgtcatgatcggggcgatgacattgaccagctgcgccaggctggcggcgcgcacgcggtcggcgttcttgagcagcgtgatcatcagatcgccgaacaccacggcgtcggcggcggtgtagatgtcctccagcagacgcggggccaccggccagttgccgatgccctcgggggtcttgctcggctcctcaccctggtaccagacattccattcatcgaacgagatgtacacgtcgtgcgcgctcttcagatgggccttggtggcgtcgatggtggcggccacgtccttgatgaagccgtccatatccacgccggaggccaggaagctggccatgtcgcgcgtgccgtcctccttgaagaacggctggtagtaggcgtggcaggagacgaagttcacgttctcgtaggtcttctcaagaacggtctgctcccacttgccgaaggtcggcatgccatgggcggaggagccgcacaccaccagttccacatccggatcgatctggcgcatgccggcggccacggaggcggcgagcatgccgtagtcctcggcggacttgtggccgagctgccacgggccgtccatctcgttgcccaggcaccacatgcggatatcgaacggcttgtcggcgccgttggcgcggcgacgttccgacagctcggtgccgccgggcacgttcgcgtactccagcaggtccagggcctcctgcaggccgcgcgtgcccaggttgacggcctccatcagctcgttgccgccggtggcctcaagccattcggccatctcgtgcaggccgaattcgttggtttcggtggaatgccaggccagatcgagtcgacggggacgttcctgcttggggccgatgccgtcctcccagcggtagccggacacgaagttgccgcccgggtagcggatggtggtggcgccgagttccttgaccaggtcgatgacgtccttgcggaagccgtgctcgtcggcggtcgggtggtcgggctcgtagatgccggtgtacacgcaacggccaaggtgctcgacgaacgaaccgaacagacgattgttgaccggagcgacctcaaaatcgtcatcgacgacgagacgtgcggtcagatggtcctgctggggcatgggattcctttctacatatctgcatgcactctgcatacgtgacacgtatccatacaacgatgtaccgcggaggcgcgggcgaccggggacatccgtgtggcagccaccagtgtagtacaaccttgtactgactgccggaaggcgcgtcgcagagacggctgagaccttttggcgcaccactgcagcaaaaaagatcccaagaagtcgaattacagtcccatccgacgcatagccaccgtgaacatacggcaaaaggcatcaaccacgtcacccgtccacccgctacattcacaagcagtaccgcccactctgcatcattcgcatatgcaaaggccgcgaaccgtacgatgacggttcgcggccccctgacatgccattaggccacccggctcgcaccggctgttcggcctgccggctcagccctcgcgcttgggcgcctggctggccacgcgggtcaggcgcggcgggcggcgcgtggacacgaacagcggctgcacctcgaccagcgggttgtacggcgccaggccgaaccacttgaccggggaaccggccacgcggcggatcgcgtacttgatctgcagcgagagggcgccacggccggagaccttcgactcgggcatcagcgccttgtggatcaccacgtagcggatggtgccgatgccgggatcggcgtcaagcttcgggtagatcgactgctggttcggcagctcgccggtcttctccagatcgtgcatgatctgatgcaggtaggccgggatggactgcgagaccttgaagccgaggcggatgcgcacacggaacaggtagtcggtaccgaagctctcgaccgaatactcacgggtgaacggctcgtcggtggtctcgacggccaccgcccaccatgcgcgggcgcgcttggggtggtcggcgaagatcgagaagaagatgtccgtatcgagacgcttcaggtccggatcgctggtcaggtagacgatgttgtccgcgaaccggtggatgcggctatcgccgtgcagcttgtccagcgcggggaggaagtccttcggcatcatgtgccgacgctgcgagcgctccagtttggtgccctcgttccacgtgtacatgatcatgaggatcgccagcgtgagcagcagcgtgaaccagccgccgtgcaggaacttggccatcgaggcggcgaagaacagaacctggatcgccaggaacacgacggtgaacacaacggcgccgaacttgttgctgcggtgccacaggtagatgcccagcaggatcgtggtggtgatcatcgtgatggtcagtgccaagccgtaggccgccgagatatgttccgaatcgcggaacagcagcagcacggccagcgtggccacgcacagcaccacgttgacgaccggaatgtacagctggccgcgggtacgggcagggtaacggacctgcagatgcggcatccagttgaggccggtggcctcggagaccatggtgaacgcgcccgtaatcagcgcctgggaggcgatgatgccggcggtgaccgacagcacgacggccacatagcgcacgttcggatccatcatctggaagaacgggttgatcccctcggcgtcggccagttcggggttgttctggttgcgcagcatccacgcgccctggccgaagtagttgagcaccagcgccaccttgatgaacggccaggtgaagtagatgttgccgcggcccacgtggcccatatccgagtacagcgcctcggcgccggtggtcgaaaggaacacggtgcccatcagcgccagaccggtggcgttattcggactgaacaggaacttgatgccgtagtacgggttgagtgcggcgagcacggaccagtcgttgccgatggctaccacgccgacgatcgccaggaacgcgaaccagaccatcaccaccgagccgaagaccttgccgatcgattcggtgccgcgcgactgcacggcgaacaggatcacgatgatcaccgcggtgatcatcatcgtcagatccttgttctcggtgaacagatgctccaacgccggcagcgtcttcaggccttcgacggcggacgagatcgacacggccggcgtcagcaccgagtccgccaggaaggccgcgccgccgagcatggccggtatgacgagccatgcgccgtatttgcgaatcaacgagtacagagcaaagatgattctgcagaaacggacatccaaacatcccaattcacatcacacatgaccgattctccagaatcggacacacagaacacatttttcggaactcagacgtccgattcggcagaatcggacacatgtgcacaagtcggatgatgagcacgaccatcgacgggcgtccgctggttgtggacgccgctgaaatcgatgagatccacaccgggcacacgcatgaagacgcgcagcatcaacgcgtggtatcgcctggcaccagcgtcatgggaataagcacgttcggctcgaacggcttggggatgttcttgcgtgaagcgttagccgcggccacttcctcattggcaatcgcctgcacgatatggtcggccgccgactgtgcgatcgccgagaaatcctgcgcgaccgcggtcagcttcatgccggccaaatcagtcaaatacgtaccatcgtaggcaacgatctgcagctcgtcaggaatggaaattccacggcccaacgcttcgcgcacgcagaacgatgcaccaatatcggaactgaccacggcatcgacaccgtcggtcgtcaccttgtcgagcgcattgctgaccgcacgatgatagccggcaaaatccatcacttcgccagcttcaacgtactcgtatttcacgcctgcggaggtcaattcctgttccaacgtgaggtagtagcgcaccgtcgggaacgtggtctttcccaaatcgaacggtccttcctcgacttctccgcgcgcagccaaatcgaagaattgatctcgcggaccgccaatcatcaccacatgtttggtaccattgcggatcagcatctgcgcaatcaatcgcccaccctgctcgtggtcggatccaatcgacgaaataccgtctccaagcacacggtcgaacgcgacgatcgggcgatgaatcgacgtccaataatcgccgggatgcgaagtgtgcgcacacatgacgatgccgtccatcatgtgccgacgcaacatgtcgacatactggatttcgccgtccgcctcatctgcggtagagcacagcatagtgcgtaatccttgcgcggcgagcgcatgctgcagatgtgcggtaaacgttgcaaagaacgggtggcggatggtgggcacgatgacgccgaccagattcgtacgatcatgatacagattgcgggcaagctcgttcggcacataattgagcagttgcatggctttgcgcacacgttcgcgcatgtcatcagacacgtacccgttgccgttcaccaccagcgagacggtgctcagagacaccccggccttcttcgccacatcgcgcatgccgaccatgatcgcaccttccccgtcatcactgttctatcgttgtatgctcacgtgcttaccacgaaatattacattcatttacattctctcgaacctgttcgacagtccggcaacgaaatacagcttcttagtgtcgactcccgcggaggcgaaggccttcagcagcggcttggtctggtcgaatgcaatcaccagcgttgcatccggactggcggccttgatggcggttgcgctcagatttctttcacgttactcagcgaccgtccgtgtaacgtgaaaattacgccggattggcaagcagcgcaatgccgaaaccggcggccacacaaatgagaggcaccgcgacggttgctattccatagcccagagccagcgtaaaacgacgctggcgaatcaatgaaaccacttcgttgagcgccgtggagaatgttgagaaaccaccgagaaatccgacaacgaacatcatgaccgtgtccatatccaccgattgcgaatagtaggacatcatggcgatgcccgcgcatagcgaggcgacgccgttgatgacgagcgtggatagcgggaagttgcgattcgttcttcgattctcgcggttccagccttgttgaattgacacgtcgagcacgtaacgggccatggctcccagaccgccgaacagacagatcatccacatcatcagcgcacctccccggtagtcgggtcggcgacaagcgaaatctccgcagtgatcggtttgggctcgaagctgggtggaagcgggttggccggctgctggattggctgcgactgctgctggggctgctggattggttgcgactgctgaatcggctcgggcagctgccccaagtctgaagtatccggctcgcgcaacaacggctgcgatgactgtgtcagctgaggaacgaccagcggaggaatctgcggaacgcggcctgtctgcataggctggctggcggtcggcggcacggttggtgtttcgactcgcggaacctgtcccgtctgcgcggcctgctgcgccgcctgcgcggcttccattgcggcctgcgcggcagaacgcgccacgtcggccactttcacatggcgtacgccctgcgtgtccgattcggcagaatcggaaacggaaacagctgaaaacgcaccccgaacccgctttcgagtactccgtgacagcagtgcctgcatcagaaccacgccggcggcggcagtgagcaaaccgcctgcaaaatttcccgcaagatagccaagcgcactggcgatatgccgctcgtgcagaccttccatcgtttccagcatcacgccggacatcgtcgaaagcccgccgagcaagccgagcccaacgccacggctgacaacctgccgcacccggcgacgcagccacgaagcggtcgccatgaattcggtcagcatcgcgaacaggaagcaggcgaccatattcgacacaaacgtgcccacaacgaacggcgtcccgctgaccgacggcagaagcatatccaacgcatgccgacagccgactccaacaaatccaccgacgaacaccacaacatacatcagtccgtcggcgagcggattgaaccgcgcctgcatacgtttcatcggtgccaggggaatcgtaggcggattcatggtgttagcggcgggcgcggttgcaccagcatgcgtcacctcaacagtgtcgattgcctgcgtgatgggatgtgagtcctcacccgcagtcaccacgtctcccggcgattgttcttgcgattccattgcgctccccctgtactggccttccgcggacagcgttgttccgcccataggccgtgcaacaacgagctgggccgcggttgccgccttcctaacgcatatgagtttacacggagcgccaacgtatgcaccctggatgtccgattccgcagattcggacatccagagtccagccgaattcagccaggctcagtcaagccgggcatcacacagccgccgcatcgcaggtcgcacctcgcgctcctcctcgccactgaacagcaccaccagatagtcgccggcacgcagccgtgtatcaccgcgcggcacgatctcgctttcgccgcgacgcaggccgatgatcagacacccagacggccaacgcacgtcacgcacccgcttgccgtccgcaatcgcccccatttccaatggcagttccataatgccgctgcccacatggcttgcgattgccatctgcatgccttgcgcgcgcatgtaccgctccagcaactccccatagatcggtttggtgcgcagcaaatcggacaccaacagcgcgatgaaagcgacggccgcgaccggcagcatgtgcgtcaacgttccagacatctccacagccaacagaatcgacgtgatcggcgttttcacggacgcggcgagcgtgcccgtcatcacgcacaccgcaaacaccgccactgcgtcggatggcagatcaccgaatcgatgcaacacttcaccgcagatgccgccggccaacgaaccgaccgcaagaatcggcatgaaaataccgccaggcgcgcctgagccgaaactcgtagatgtgaacagcatcttcgccacgaacagcagacacagcattcccaagccgacgcgcgcatgttcggcggtatcaatcagattcgagccgccgccgagcacatcgggcaaccagatgccgacaggcaacgcgatcgcaatcgcaatcaccgggcggctccatgccggcagtttgccgtacagcgtctggaagccaagcaacgagcggttcatcagcgaaccaaccaaaccggccaccaatcccaacggaatcagccacacatactcttccaacgacagctgaccgatatcaccgaaatccaaaaccggacgcagaccaaaacagtattttgagacgaaatcggcggtcagcgatgcggcggtggcgcccatcagaatcgcaggggaaaaactccgatgcaccccttccaaagcgaacatcatgccggacagcggcgcgctgaacgcggcggacaagccggccgcggcaccggcggtgaccagataatgctcctgcatgtcctcacggcggcggccgcgcaaacggtgggatacacactgcgcgcccgacgcaccaatctgaatggacggcccctcacggccgagcgacagaccaaacaacgcgcccaacagtccaccgacgaaacggactggcagaatcgtctgccaacgcatcttcaagccgcatatcaccacgccgttggtctgcgggatgccgctgccaccagccatcggctccttgccgaccatccacgcgattgccagcgcggccgccaccgcggcaaccgcccacggcgcaatcagccacggggtctcgcgaatccgcgcatatatccaacgggacgcatccgtgccgtattcgatgccgagacggtatacgacaaccagcaatcctgaaaccagaccaatgactatgccggccgccgccatcttccacttcaagtggtcgaatcgcggaatcagccggcggatatcatgtgccgcgtcgttaccagtcaagccgggaaattcgttgcagacggtcagtcgaccagcgaattgatctggatgacatgatcgcgctgtgggccggtgccgatcacggagatacggcagccgctcagctcttccaaacgcttgacgtaggcctggcaggtggcgggcagctcgtcgaaggagtggcagtcggagatgtcttcatcccagccgggcatggtctcgtaaatcggcttggcggcggcgaaagcggcctgatcggtcggcatatcgtcgtgacgttcgccgtccacgtcgtaggccacgcagatcggaatctccttcaggccggtgagcacgtcgagcttggtgagcacgatgtcggtcaggccgttgacctgggaggcgtaacggttgacgaccgcatcgaaccaaccacagcgacgcgggcggccggtggtcacgccgaactcgtggccctgctgacgcagccattcgccggactcgtccagcagttcggtggggaatgggccttcgcccacgcgggtgacgtaggccttggagacgccgattacgcgggtgatcttggtggggcccacgccggtgccggtgcaggcgccgccggcggtcgggttggaagaggtgacgaacgggtaggtgccgtggtccacgtcaagcatggtggcctgagcgccttcgaacagtacggtcttgccttcgtcaagcgccttgttgagaatcaggccggtgttggccacgtacggcttgaggcgttcgccgagcttcagcagctcctcggtggtctggtccacgtcaatcggacgacggttgtagagcttgaccagcatctggttcttctggtgtaggctggcctccaccttgtcgtgcagatggtcggcgttgaacaggtcatgcacgcggatgccgacacggttgatcttgtccgcgtaggccgggccgatgccacggccggtggtgccgatcttgtgcttgccaaggaagcgttcggtcaccttgtcgagtgtgcggtggtagggcgcgatgatgtgtgcggcctcgctcaccttgaggtgggagcaatcgatgccgcgggattccaggccgtcaatctcctcgaagagcacttccgggtccacgaccacgccgttgccgatcaccggggtcaggttcgggttgataataccggaaggcagcaggtgcagggcgtacgactcatcgccgaccaccacgctatggcccgcgttgttgccgccgttgaagcgcgcgacgtaatcgaccttggtgccgatcaaatcggtagccttgcctttaccctcgtcgccccactgagcaccaataagaacaattccaggcatgatgcacctccgcattcgcacgattccgccggaaacagactaccgtacaccctctaccctgcgaagtttcgtctcacgcagggcgaggctgggggtgcgacgacccggaatgggtgacgaatttctactcgtacgaggcggcgctgtgaccaatcgcacaagcgcacaggttgaagaacggggcctagcgggcatgcctcgcgcgataatgaagccatgacgatcgcaacaccggaacgctatgccgaaatgctcgatgccgcccgccgaggcggttacgcctatccagccatcaacgtaaccagctcacagacgctgaatgccgcattgaagggcttcgcagacgccgagtccgacggcatcatccagatttccgtgggaggcgcggcttacgtctccggcataggggtcaatgatcgcgttaccggctcgctggcactggcggctttcgcacatgaagtggctgcgaaatacccgaacatcaccatcgctctgcacaccgatcactgcgccaagcagtatctggatgagtgggtgcgtcctctgctcgcgcatgaggccgatcaggtggcacgaggccaggagcctacattccagtcgcatatgtgggatggctccaccgtgccgctcaaggaaaatctggacatcgccgaggaactgctcgacaagtcgcagaaggcgcacaccgtgctcgaaatcgaaatcggcgcggtcggcggtgaggaagacggtcactccgccgaaatcaatgaaaagctgtattccactccggaagatggcctcgaagtcgcccgccgactgggtttgggcgaacgtggccggtacatggccgctttcacattcggcaatgtgcatggtgcctacaagcccggcgtggtcaagctgcgtccgtcgctactcggcgacattcaggcgcgtgtggcgcgcgcggtggccgaaggcgagttgcctagcgcggccggcatagtcgatttccccaacggcaagccgtttgagctggtgttccacggcggctccggttcacgcccggaagaaatcgccgaagctgtaagctacggcgtgatcaagatgaacatcgacaccgatacccagtacgccttcacccgtccaatcgccgaccacgtgttcgagaactacgacaaggtgctgaagatcgacggcgaagtgggcgagaagaagttctacgatccgcgttcttggggccgtaaggctgaggattccatgtccgcccgcgtggtcgaggcttgccggcagctgggttccgcgggcaaagcgctcaaatagagcgtagttttgcgatcgtgcgcgacacttcccggaaataatgaaaatcattgaaaatcaatggagcggacaacgggagtcgaacccgcctctaaagcttgggaagctttcattctaccgatgaactatgtccgcatgccttacggctgctgcacctcacgtgacgagcatgctcagccaaacgaggcacgaatagttatcctagcacgtcacctgccgacgcgcgtggagtaggtgggcggagcgatcggcgtgccgttcatttcgttggccatctgcatgagacgcgctatgcgctcatcggtcggcgggtgcgtggagaacaagcgcgagaaaccgaccgcggagaacgggttggcgatcatcattgcggagacggactgggtgccggcggttttgcgcatcggcgcggtctgtgcgccgtaggaaatcttgttcagcgcggaagccagggcctcgggatcgccggtgagcaagctgccgtcttcatcggcgtcgtattcgcgggtgcgggagatggccatctggatcaaagacgcggcgatcggcgcgagaatcacgctcagcaatgcgccgatcaggccgaggccaccggaactatcgcggtcgtctcgcgagccgccaccgaaatacatcagcgaatagcccagataggagatgacagtggccatggcagaggcgatggcggaagtcaggatgtcgtggttgtacacgtgcataagttcgtggcccagcacaccacgcagttcacgggcgttgagaatctgcaggatgccttgggtgcagcagacagccgcgtgccgttcgttgcgtccggtggcgaaggcgttcgggctcatggtgggggcgatgtagatgcgcggcatcggcttgccggccttggcgctcagttcacgcacaatctggtagatttccggggcttcctgctcgctgacttcccgcgcgcccatggaggcgatggcgagtttgtcggagaaccagtaggtgccgaacgtggtaatcaggccgatgacgatatagatgctcagggtttgccgactgccgcccgtggcccaccaaatcagcatgatgatggcccacatcagggcaaacagcagcgttgttttcaggccgttgaaatggccgtgcacccgtactttggcatccataatgcacacactaaaatcgcaggctgaatgattgctggatatgcgccacgcgcaatgtcccatattcgcccggcccgtccggccccgagcccggccgcgtccgcacggggcgcggccgggtggacgaatgccggacgaatgccggacgaatgccggacgggcgtgggcgggccgtcaggcgtgggcgagctcgcgcatctggtcgggctcgatgaccttcttgtgctcgcggccttccttggcaccctcggcgcgctcgaaagcgtcgaccttcttccagccggcgaagtcgatcgggcgaatgccgcgctcggccagcagtcggtcgatggattcggggtcgcggtcggctgccacacggccaccttcagcggccttggccagatcctcgagcatgttggtcacgatggcgagcgcatcggacttggtggagccgatcaggcccaccgggccgcgcttggcccaaccggtggcgtacaggcggtcgcgcactttgccgccgtcggcctcggtggtgatgcggccgtcgccgttggcgttggccaggtgggcgccgtgctcgtcgtaggtgataccgggagcttcggcgggcttgtagccgatggcgtggtagacggcctcgaccgggtagtcggtgaactcgccggtgcggtgcatcttgccgtcggcaccggtttcggtgcgctccacgcggatggccttgaccttgccgtcctcgccgaggatctcggtgggggcggagttgaagtgcacgtagtacttgcggtcggccgggttgccttcgaagtcgacgtcgccgtcatcttccatgtcttcggccatctcgcggacggcgaacagctcctcgaccatctggcgggtgagcttgtccttgccggccacctcgatggtctcgtcgtccagatcgaagtcgtcctcgttgatgatgagctgcacgccgggcagcttctccatctcgcgcagttcctgcacgctgaacttggcctgggccacgccacggcggatgaacaggtggagcaccttggccttgttctggccgatgccctcgtacacgttgtccggaatgtcggtcttgaccttgaggtcgtcggcgttgcgcatgagttcgcgggccacgtccatggccacgttgccgccgccgatcacggcgacgttctcggccgcaagcggccattcgcgggcaccggtggggtatccgtcgtaccattcgacgaacttggcggcaccgtacacaccttcaaggtcggcgccgggcaggttcagcggcttgtccttgaccgcgccggtggcgaacagcacggcgtcgtaacgggccagcaggtcgtcaagagtcacgtccttgccgaattccacgtcgcagtagaggtggatgttcgggttatcgagcgtcttctcaagcgcggaggcgatgaacttgatggacgggtggtccggggccacaccgtaacgcaccaggccgaagggcacgggcagcttctcgaacaggtcgatgcgcgcttcggtgccgaggccgagctcttcgcccagcttcttgagctggcgcaggaagatatcggatgagtagacgccggccggaccagcgccaattacagcaatgcggagttcagtattcacagattcagtcacgcgctctagcctaacgcaaagccttccgttgcaacagagggcgagtggtgggaattctgtgtattaggccatagtttgtgcgtttgggaaacctacgagcactgctaatgtcagattatgggtttccctattggtcaagttattgccgttctcattccaagaagcatgcaaggcggatcaggcccttactccggatacgtttatgctgcaaggcggttatccacgcatttacgacacgagaatgccgctcaatctgttcttctcgaactacatcgacacttatatcgaacgtgatgtttccgaatatcttgatgtacgcaatttggctgacttccgccgattcttgactctttgcgcactcagttccggagcactcataaactacaccaacatcgccaatgaacttggtgtaagtccgcgaaccgtaaaggcatggatgtcgattctggaatcaagttacatcgcattccatctcataccgttctacacgaacgcacgcaaacaggtggtcaaaacgccgaaactctatttttatgacactggcttgctgtgccatctcttgggcattcggacggtcgaagcactggttgcgcaccccaagttcggcgatatatttgaaaacctcatcattgcggaaaccatgaaacagcatttgaacgccaatcaggagccacaattattcttctaccgcgatgccagcaaggtcgaggtggatttgttggatttcaccgatcctaacaaccgtatgctcatagaaatcaaatccggacaaacctatcatgaccgattcgctcggcacctcactttaattggcaatgttctcggtataccgtgtgagcaacagtacgtaaccagtcgggttgaacatagttatgtctcacaaggaatccgcgtcacttccgccctcgattggctagaaggccgacggtaaagagccgccgcagaacaataacaatactgcacaaccggcgaatcccttgatgacactgaagacgtcacctccaacggctctttacgacctcgattgcattcattaggtcatttcttcgttcattaggtcggagggtgctgaagccatcccttggaacggcggggtttcaagggccgctccgaccaaggaccgacctaataaacgtcaaatcgacctaatgaataactccgatgctattgctgctttcgtgggtgggatttccgtttccgccacgtcaccaaccgtatcgccccgattatgtttcgatgcggtggactcgacatacgaccatcccggtcagtcaactgacctacaaaaacagcagaagcctcatattcttaatcagtcccgatcaattagggcagtgagggcccagaggatgctcaccacgtcgatggcctcctggaggaaggcaccgacgacgaccgggataaggttgaacgcggcggcaatcatgccgatggtggcaagcacaaggcccgcgattacggcttgaagcatcacgcgcttggtgcggcgtgcaatggcgatggcgcgcggcacggcggcgatattgtcattcataatgaccacctgagcgctttcggaagcggcggtggacgtgccatcggtcatggccacgccgatatcggcaacagcgagcaccggggcatcattcacaccgtcaccaaccatcatcgtgacggttttgccggctcctgtagcggccctgactgcggctaccttatcctccgggaacagttcggcgtgaacctcgtcaatgccgacttcgctggcaatgatattggcggaagcccgcttgtcaccggtaagcatggcgagctcggtgacgcccaactcatgcagtttggcgagcactgccttggcgttggcacgcggcacatcgcgcagcacgatgcgcgcgatcagccggccgtcaacggacacgtaggacgccatctcatccggctgcagcaggccaaagcgagtgcgcaggtcatctttttgctgagctccccctcttagggggagctggccgcttcgcgggctgaggggggcagcctcgccgaccgccaggaatccatcctccccagcagccgcgaaagacagccggccaacgcgcaccgcgtgtccgttcacctcgccggaaacgcccttgccggcgtcttcattgatgttcttgacgaccggatactcccggccatggccaggccagctggcctccggctctgggcacaggcgctggccatcctcgaaccgctggcgcagtcgggccagcgcctccgcgccggccttggcaatgcctttggacaggatgtgcaccgagtagctttccaccgcgccggccatcatcagcacatggtcttcgttgagacgggttgcagcgccgggcaacatctcgacgcgcaccacctgcggctgcttgacggtgagcgtaccggttttgtcgaagaacacctgcgtgacgcggccaaggttttccagcacgtcctgtgctttgataagcacgccggctgcggcgaggcgtccggttccggcgatgtatgccaccggtgcggcgatgagcagcgggcagggcgtggccagcaccagcacctgggcgaatcgcgtcggtaccccggacaccgcccatgcgacgccggcaatcaccaacgaaagcacggtaaagggcacggccaagcggtcagcggtttttaccacggccgggcgcgactcctgcgcggaggccacgagctcgaggatgcgctggtactgcgaatcggcggccacctgggtggcacgcatggtcaatgcagtcgagccgttcaccgccccggacatcacacgggcgccggcgaacacttcacgcggcaccggctcaccgttgatattgctcaggtcgagcgtggccgtgccggacagcagctcgccgtcaaccggcacagtttcgcccggcaacaccatgagtacgtcgcccagctgcacctgctcgaccggcaccgtgtcgaagcggtgcgcggcggcggcagccgatgccaagcccacacgccggaagccatcggacgaatcgcccttatcggcagcaaacccacgccccacgccaggcaggttgacgacgtgcgcggtttgcggcgcggcctccatcagcgcggtcaggctgcgctcggccttggcttgagcgtattcctcaatggcctcgccggacgtgatcatcagcgtcaccgcccaacttgcccagtattcggcgacggccacggtggagaggatcgcgaccacggccagcacatcgactccaacctgcccatgacgcaaatcgtcaatcatgccgcgcacagtgtcaatcacgataatcagcaccagtgcgataaccagccactggccgaagcccggattgccgagtaccggaatcgccatcgcattgccccacggacgccaatcgcctagtaaagccaacggaattgcggcgatgacgacgaccggaagcatcggcacaagcttgcagatgtcgagaattttggtgaagaatctgatgagtctgctcatcattgctccttacgctcgtatacggagtcgattgcggtacggcaagcgtggcccgcgcaatcggcgctacggtcacgccttgttaacccaccggcggctttgcctggggcttcgctttgctcggctcccgcgcaaccttccgatacacggcgtaaagaaatgtattcagttttgtattgaattatgcgctgtgttcaggacgtcgcccgaactcagtgcttggcctaccctatcaacgagcgttgcgcgacatgccggatatcgaaactgcgttggcggcatgggcgcggggcacaatcgcgcatacgaaaggcccgtggcaggagtttgctcactgtcacgggcctttgcttgtccgacacggtgttcagcggttaccgctcaacaccgtgtgacgttgtcgagtcggctttaccacaggccgaacgggtcggagaagccgccgccgtcaccggtgccgccatcgctgttgccattgccattaccgtaaccgttctggccattgccgttctggttgttctgcttattctggctgttgccgttggaatcggagccggacgaaccgttcaccgacgactcctcctgatcgagcgtcacgtccacattcatggtcttgccgtcgcgcacgatggtcagcgtcaccttgtctcccaaagccgcggcacgaacgtaaccaagcagcgagtagttgttgttcacggcgttgccgttgaaggccacgatggtgtcgccctccttgaggccggccttgtcggccgggccgccggagacgaccgcgctgccggtggcgctggacttggtgatggtcgcgccgccgcgggtcacgccgtcggcttcaaccgtgtcggacttgatgaccacgccgagggcaacgtgcttgaccttgccgtccttgatgatttcgtcggccacacgcttgacgaggttggacgggatggcgaagccgatgccgatcgaaccggcggagtcggatgaggtggcagtcgaggcgatggacgagttgatgccgatcacctggccggccgcgttgaaggtcgggccgccggagttgccggggttgatggccgcgtcgatctggacggcgttggtgacgatctcgttgttgttatcgtcggtcacggtcaccgggcggttcagggcggagacgatgccggtggtggcggtgtcgtcgtagccgagcgggttgccgatggccatcacgttctcgccgacggcgagcttgtcggaatcggcgaatttcacggccttgaggtcgctcggcgggttgtcgagcttgatgaccgcaagatcggtggtggtgtcggtgccgacgagcgtggcggaatacatgttgccgttggcaagcgtcacctgaatctgctgggcaccggagatcacgtggttgttggtgatgatgtggccttcggtgtcgatgatggcgccggagcccttggcggtgccgttgctcaacgcggtctggatggagaccacggagccggagacatcgctggcgacagtctgccagtcgggggcttcgccgctcttggcggtggcggacccggagccggacttattcgagctgacgttggacagcgaattgctggtcggcaaggtgatcaggccgctggtgagggcgccgtaaccgaggcccaggcagagggccgcagccagaacggcggcgaccacggcgatgaggatgttgctcgccgtcttggacatgccctgcttggcggggccgggctgaccgggctgtcccggctgggtcggaccttgaccgttcggcgtaccggtaccgggagtgccgaaaccgaacagaccgccctgctggggctgctggccattccggccattctgaccggactggctggcaaacgggttgccgttgttctgctgcggctgcgtgggcggattgaacggattgccgttgccctgcggctgcgggttattggtgtagtagggattgcggttgccctgctggccctgtggggtttgctgtgcaggctgaccgaacgggaattgctgcgtgggctgggcattgctgccggcctggccgccctgctggccctgtgcctgagtcggggtcggcccataagcgccgtattccggggccgggcggtacagcggagttgtggccgaggtctggtctgcggccggcgctgccggagaagccggcgaggaggagaccaccgtgctctcgcccttggcggaggcgtagtccgggatgggctcggtggcggcggtgtcggtaacggcttgcgtaggccgctgatcggcagcgagggcggccgaggaaaccggggcttgctgctcgctggaatcgctggcgttgccggcatcaaccgagtcgccacccacaaacgggttcttcggctcggcgttgccggtatcggcagtactattggggttttcgttattccgcggggtctggtcgacgccctgcgggttaaattcgtcagccattgctgctccttttcctaaattcctatcacgtctgttcggcggctattcgggcacttgcccattgccacttctcgtgtgctacctcagtagtaaaggcagtcaatctggaggttttctgaacgttgattgaaagtctatgcgtaatcatcgcagagtcttatgggcatctcggcttcgaggggctgatttcctgtttcgggaacatctacttgcacttcaaggggctgttcgcgcggtcaattccgagtatcaagggccctcatttaacgccattccgccatttttgcagccggcctacttgaccgggagccccttgaagcggaagtagacgttcgggagcggcgaaatccgcccctcgaaaccgagttcttcacaatttccggcccttttctggcccttctgcctaaagtgaacatatgacgatcagccttcttgaacatccgttgggcgcacagcccggacagcccggcgaccgcagcgccttccatttcgaaacgatcacccgcctgccatccacggccagcgggcttgggcgagacggtgcccgatacggccgcaccggcatcattcacacgccccacggcgatattcgcacgcctgccttcgtgccggtgggcacgcaagccgcgatgaaggccgtgttgcccgagcagatgaaggatctaggtgcacagtgcctgctggccaacgccttccacctgttcgagcgcccgggcgaggacgtgctggacgcggccggcggcttggcgcgtttcatgaactgggatgggcccacgttcaccgattctggcggtttccaagtgatgtcgctgggcgtcggcttcaagaagacgctggcaatggacgtgaccggcatgaagtcggacgacatcatcgccaagggcaaggagcgcatggcctgggtggatgaggacggcgtgacgttcaagtcgcctttgaatggtgacgcacatcgtttctccgctgagatttcgatgggcatccagcacaaaatcggcgcagacatcatgttcgcgttcgacgaactcaccacgctgatgaacacccgctcctaccaggaggactcggtggagcgcaccttccgctgggcccgccgatgcgtggatgagcaccagcggctgacggctgagcggctgggcaagccctatcaggcgctgtatggcgtggtgcagggcgcgaattacgaggatctacgccggcgcgcggcctcgcaaatcgcctcgctggacttcgacggcgtgggaatcggcggcgcgatcgagaagcgcatcatcggcgacacctgcgcatggatctgcgacgcgatgccggaaaaccgcccacgccacgtgctgggtatcgcctctgtggacgacattttcgcttgcgtggagaacggcggcgacaccttcgactgcgtggcccccgcacgctgcgcccgaaacggcgcgatttacacgcgcgccggccggtacaacatcaagcgtgcccagcataagttcgatttcgggccgctggaggagggatgcgactgctacacatgccagcattattcgcgcgcgtacgtcgaccacctgctgcgcgcccgcgagttcaacgggttcacgttggccacgatccacaacgagcatttcttcgtgaagctgctagacgacatccgcgcctcgatcgacggcggatactttgatgagttccgcgacgaagcgctggcccacttctacggcaacggcgagcgccggccagggttgtgagtttttctccttcgttgcggcttgtgctgccacgaagtgactgaggggagtgtcgccaccgtcaaagatcacggcacccgcagaagacccacgagcgatatatccctgccgcacatgcgacacgccgaagattgcatgattacccagccgggtgtaagttagtcgattgtctgcgagtgtggcggaatggtagacgcgctgtcttcaggtggcagtgagtgtatgctcgtgggggttcaactccccccactcgcaccagcaactaaagggctggaatcggaaggttccagcccttttgctttgtccgggcacgcgccgtttttcaggggggctttaggacttgagacttatggcccaactttcgtggcggaaaatgtcccggtacctgcatcaatcgtttgacgttcaagccaggccagaatccgctgtcccggttcgcgatttcgggcgatctttgcaaaccgggacaatttttgttgccccggtataaatgtcaatcgatttatgcgaaaaccgggacaacgtgccaattccagaatcggccttactccgccgattccgtctgccagacgatatgagttgaggaaaccggagtgtcccggttcacgaaaacaagccgaaatcgccgaccgggacagcggattctgccccggtcgacaggtcaaacgattgacatatgaaccgggacaaatacagatcagagagaagcccatgaagcagatttaactttcctcaactttccatccgccataaactagcattacataacatcatgaaccgagacgaaaccaacgaagtatctggagtcaccgacgaccagctcggccgaacggccgagccgtacgaatccggcaactggcggggcggcgtcgggagcatcattcgcagcaatccgaaatcaggaaccgacacaagtcggacccagcagacacgcataatacgagttcacagactcggcgatgtattccgcaaccgcaccaccgaataccacaccacggaagaactgtaagcattacgaaatcaaccttgattattgcgcgggcctatactaggttacggtagcgtaggttagtggtcgggagagcgtcgccggccatagcgaggtgatcagtatgagcgtttccatcagcacgccatctggacgaaccatggcttccgccgcaacagttgcgccttccgcaaccgcgagtcaaaaatccagcgcaagcgccaaccccaccgcactggaccgtgcatcggcccgatacagggccgcgcaatcgcgctacagccaagccaaggccgcactgaaggcgatcaagcgccagatcgtccccgtggatgcattcggcaatcgcaagccgcgactgcgcggatggcttcacctcgccaccctgccgctgtgcatcgcggcgtccatcgtactcatctgcatcgcgccggccggctcggtcaaagcggcctgcgcagtgtacggtgcctcggccatgctgctgttcggcaacagcgcgctgctgcacgtcgtgccgtggcgcagcgcgaaggtgactcgcgtactgtgcggcatcgattattcgaacatcttcctcatcatcgccggcactaacacacctgtgctgttcgcactcagcccggcgattcgccggccatatctcacggtgatttgggtgaccgcggcgatcggcacgatactgcatatcgtctggctgcgcaccccgaactgggtgttcaccactgtgtatgttgtgctgggattggcgccggtgacacttattccgcaactatggacggctcccgcagtgggcccggctgcgaccattcttatcgcgtgcggaggtgccgcgtatatcgccggcgctgtgtgctttgcgctgcgcaagccgaatccgattccaggctggttcgagttccacgaggtgtttcacctaggcacggtcatcgggtacgcctgccacgtcgtggcgatttatctgattgtttgcgcgctgtaggtttgcgaaccgtgcgggcagcccagcagaccacccgcacgccctcaattcatgagtattttcaggccgtacgcgcgatctgcacggcggtgccggacgcggtaaccatcagcataccgttgtcggcgccgagcacctcgtagtcgatgtccacgccgaccacggcgtgcgcacccatcgcctccgcgcgttgttgcatttcggcaatggcctcgttacgggcgcgcatcagctcttcctcatagccctggctgcggccgccgaacatgttacgcaggcccgcgccaagatccttgaacatgttcacaccggacaccacttcgccgaagacgatgccctggtagttggtgatggtgtatccgtcgacggacggggtggtggtgacgagaatcatggcgaggctcctttggcttgtctgcgtagatgaatcactgccgagagtcggatcgctcccgaatctcacctcggaaacggatcgcttctcttggctaccacaatagtcgagagcgccttccccaacatcttcaatccacgcgattgcgtaatcaaacgcatgtttcgcctccaaaaaatgctgatagacattgggccgcaaaaggccagcctcaacgggcgcaagccgctcaccaaactgaatcgcagacccaaatgactcgtcatgggcaaacggctggaccacccaaattccgctgcgataatcaaccatcaccgaaagcccaggctgctccgtcgatacgaccatcatcgaaccggacacgttctcgacattgatattcgggtgcccgtacaacgcgtaactcaaaccatcatcggcaacaccctgctcttgccaattggcgcctaagcactccaacatctcgctgggcgagtacgcacaatcttccgcataatcaatcggctgagcatccgtataacagcattcaccgccgtcaccttccgcaatgctgcgctccacaagataggccatcacatccggcatctcccaataatcaatggacagcttatcaatacagccgtttttccaagccatataatgcgtttgctcgtcgccaagaatctcttcaaacgcctcggctgagataaacgtcgacccgtccaactgatagcactcgtccaaaggatagatttctcggttcgcgtattgttcctgagccttggacacaagcttgtcatccaatgcgctcatctgctgatcaacttcatcctgtgagggaatgaaaggggcgaagtccagccctgcttcgccacagcctctctgccgttcacgcctgtacatcacgtccgcacacgtatcggtctgccgttcattcaccattgatcagcctttcttttcgttccacaaatgccctagaacactgcgattccagtagttccgattgaatcaggatcgttcttgcgaaactgtcgaggatcgtggatcgcttgtggatcttgaagcgttgtatcctggttgttcatggatccggaacgcaaaatcattaacgtcgtgggagccgcaatcgtcaccaacggcaccgtactatgtgcacaacgcggtccggggaagtcgttggccggatactgggaattccccggcggcaaaatcgaacctcatgaaacagcgcggcaggctttacaccgcgaaatcgaagaagagctgttatgcgaagttgaagtcgcggaagaagtgtgcaccagcgaatacgcctacgactttgggaccgtacggctcactacattcgtctgtcacctcatcgccggcacaccgcatctcaccgagcatactgatatccgatggctgaatcctgccgatatgccgacattgaactgggctccggtagatcgcgaagcagtcgcgattatcgccagcaaacagctgacgctccgatgaatgcgccatagcgcagccatgcagtcatgcagtcatcaacaaacaattcgaatcgcaagggaacaagacaacatgtctatcaatctggccagcacctcaagctctccggccaacacgcaacatagtgatcctggcccgacaccctcaatcctcgaagatgtcatctcaggtctgatcgagccgcgctcagatgctcccggcgaatataagccgaccctcatcgcaaatcgccccggtggattgaccatgcgcgaggaaatcggcaattccttggctactagcgattccttcgacatttctgtcgcattcgtctcggctgaggccgtgctcagcttatttgaagacttcagaagtcaccatgaaacagcgacccgagcgggcacactgattacctcaacgaaaaatcatttcaacgatcccagggcattctgggagctgctgcatcttcagaacaccactggtgttgacgttcgcgtgtgggaaggctcccgcaatgcctcagtggccgcaatggctcaaggacagccattccatccaaagggatatatcttttctcgccgcatgaaagacggtacgccctattacgacctgtacgttggcagttccaatctcactggagccgcattgaccacgcaacgcgaatggaatctcaaagtctcatcgctggcggatggagagctggtcgggcagttccaggatgaaatcgactcacaggtggccgattccgttccgctgaccgaagagtggatcaaacagtatgaggaagatttcaagaaatacgccccaccgcgtcatgagattctgcagtcgtttgaggggcatgacattcagccaaacgccatgcaacaggaggcgttggcgaatctcaagaaacttcgtgaacaaggcgagcaccgcgcaattatcgtgtcggccaccggcaccggaaagacgtacctttccgcattcgacgtacgcgaatgccagccgaagcgcatgctgtacatcgcccaacagcagatgattcttcaaaccgcaatgaactcttaccaaaaggtgctcggctgtgatgaatccgaattgggattgtattcaggcaccagcaagcaacaggaccgccgctacgtattcgccacggtacagacgatgcggcagccggaggttttggcgcaattcaaatccgatgaattcgactacgttctggttgacgaagttcatcacgctggagccgaaggatatcagcgcgtcatcaatcatttcaaagatgccgacttcatgctcggcatgaccgccacgccagagcgcaccgacggcatcaacatcttcgagctattcgggcataacatcgcgtacgaaattcgcttgcaaaaggcgttggacgagaacatgctctgtccattccactactacggcgttgcggaataccttggctccgacgacgatccgaatggaatcgcccatcgtctcgatgtctccaagggtcttgatgcgaaggactcgaaacagctcaagtacgagatcgagcagcttgccaccgaaaagcgagtccgctacatcattgacaagttgcaggaatatgggcagttcaacattccggtcaccggactcgtgttctgcagccgacaggaggaagcccataagctgtcccagctgtttaaccagcagtggaatcaacaagatgaacgcccctatcgcaccgctgccgttaccagcacggacgatgacggcaggcccgtgtcccaagcgcagcgagacgaatacgtccgcaagctcactgaaggcgaactcgactatctcttcactgtcgatatgttcaatgagggagtcgatattcccgccgtcaaccaaatcgtcatgttgcgcagcaccgaatccagcattatcttcacgcagcagctcgggcgcggactgcgcaaattccctcacaaagaaagcgttgtggttatcgatttcatcggcaattacaacaacaactatctgattccggtggcgttatacggcaacactggcgaccgcgacagggctcgcaagaacctgcagcgaaagtcaatcggcctgtcgtccatcagtttcgacccgatcgccaaggagcgcatccttaagtctttggacaccgccgactggtccgacatgaaaaagctgtccgaacagtatcgccaagtccgttacgagctgggccgcatccccatgcttacggacatctataactacgacccctcactgccgtataccatcgcatcgaagcgcagcaactatcttgatttcgtgcgttcccgtgaaaaaagcctgggcaaaggcaaacatcatgaagcgacatttgaggatcagttggagccggtgaccgacgttgaagacgcgatactcaagatggcagcggagctgctgctgcccggattgcgaccgcacgaattggtcattcttgctcagctatgccatttcgtcagcgaacggctcgacgacgacgtacctcagcattggagtgcgggctcgtcaatcggccgcagcgaactgctcgatgcgattcgtactgaattcccgctggccgatggttcagacgcgcaattcgactctgcgatcagcgtgctcgattattcatatttcaccggcccgaactgcaatcgttttggcaaccagccattggtcgaaaccttgaacagcaccggcacaggaagcgacaccgcatatcggttgagcagcagattcgccgacatacttgccacgaaccgaacgttccgcatcttcttcgcggacactttgcgcaccggtatggccaattgccgagatatgttccgcgaggccgccgccaggcaacaggtcttcgaccacatgttcttgtacgagcgcaaatattccatggctgacgtcatgcgcctgtgcggatggaagaaggaaaacactccgcaaaacgtgggtggttacctgctcgacaaggaaaccaacaccatgcccatcttcgtgaaatacgcggccagccaatacgaggatgaattcctgagcacacaggaaatgaaatacttcagcaagaacggacgcactccgcagtctccggaattccgatgggcgcttagcggcattggcccgaattgggaccacacacatttcgtcccgctattcgtcatgcgcaaggcggaagaggccgatggcaagtactactacgttggccacgtcgctgcgtttgagaatcctcagctcaccaccaagcctgacgcaaccggacagggcagtgtgaaggtcaccctgtcggtcctgcgtttggcccggccaatcgatccagagctctatcggcatttagccggctgaccatcagctcctcaaccgtacggcggcggccattccgccgtcgccgtaggtggggtgggccatgaaggcttgactggcggtggcgtcgccgcgcatcgactcgtcgtagccgccacagcgctcccacgcggcacggcgaattatgacgtggccgggcagcaattatgcgacacgaacgtggcggcgatgccacggttacgcacggcgcatcatgcgatgctcgccggcgaccgtgtgctcatcctcacgcttggcgggcttgcgagcgcccgcgatattctccatgctcatgcctgatcatcccatccacaaccgcaatccagtcgccgtagccttcctcggccatgcgcgagcgcggcacgaagcgcagggcggcggaattcatgcagtagcgcaggccgccgcggtcggccgggccgtcggtgaacacgtggcccaagtgaatctgtgtgtccgacgtgcgcacttcgatgcggtcgcggcccggaatgcggtggtcctcatgctcggtcagcaagtcaccggcaatcgggcgggagaacgcgggccagccgcagccggaatcgaacttgtctcgcgacgagaacagcggttcgccactgacgatgtccacgtagatgccgggctcaaactcctcgtcatactcgttgacgaacgggcgctcggtagcggcgttctgcgtgaccgcgaactgctcaagcgtcagatcccagatgcgttccacgtacttctgacggcgttttacgttcgcgattgcggcgatcggtacatggcagtagccgccggggttgttcaccagatagtcctgatggtgtgcctcggccgggtagaagttgcgcagcggttcgaccagtacggccgggcgctgcggctggcggtcgaccagctgctccagagccgccacatacacggcgcgctgcgtctcgtccgtgtagaacatgccggtgcggtactgccggccgcggtcctcgccctgctggtccacggagaacgggtcgatgacctccaggaacagcaatgtcagcgtccgcaggctgacctgtgccgggtcaaactcgactttcacggtttcggccgcatcggtgccgcccgcgcagacctgctcgtaggtcggcgattcgacggtggattgcgcgtagccgaccgtggtgtccgtgacgccgtcgacgttctggaagtagcgctccagcccccagaagcagccgccggcgaagtatgcggtttgcgtatttccgtcattgtgttcgttacgttcgctcatacgccccacgttactacgtcgaggcggctcgcgatgcagtcaacgacacctctgcaccggcaaaaccgctttcgaggggctgatttgacccccgccggaggtctactcccgtttcaaggggctggtcggccgctagaccgcatgtaaaaacccatccgcgccaacgccattccgccgattttggagcgtgaatacttcggcatcagcccctcgaaacgggagtagacctccgggagagaccaaatcagcccctcgaaacggagatagcgcttgccgcgccctccttgtcaggctttctccgttcaaagaggtacattcgggcttctgcagaatgctatcttcgttcaaagaggcaccgaatacgggaaaccccgagtacaaacgttgtcattgcaacgctcatactcgggatttcagagttcaggtacctctttgaaggcagttagttgtccgcaagaggccaaatgtacctctctgaaagcagataccccgtctcaggctcgaatcggctagcctgcgtacccgtgtgcacaccttcacgaccgcagcgtactgagcatgccggccacttcggcgggcgtcacgctgggcacgtaggcgcgcaccaccgcgagcccgatctgcggcaacgccgccgggtccgggtagcacacgtagaccggcgcttcggcgggctggaacttgcgcttgaagttgaacagcgagtggaagccgtaggcgggttccatccagtcggccacgatctgcagcgcgtgttggagcacctgcgtgccttcgccggccgccaccccaccttcccgggcattgtctcgctcggggttcatgccggccaagggtgccgcggacaggctcatgaactccacggcatgctcaggatccgcaagcccctcgtcgcgcaggcgctcggccatgcgcgcgatcaggaactccataatgccgttgggactgtcggtgcgatggcgcatgaagtccagcgtccagccgacgatgcgcccgtcgcgccaggtgggcagccagctggtgacgcccagcacgcgcccgtccgcgtcgatggcgtaaagcagccgcacgcgcgggtcgcgcagttcctcgacaccgccgagcgtgaacttcatttccggcagcgccttgagctgcgcccactcctcggagatgtcctcgatctgctcgcgcacatcgagcgacgcttccaggaacgtggactgcacatcggtcacgccgtcgcgcttggccttgttgatggcggtgcgcacatcctgccatttcttgccggtcgtcttccagccgcgcgggtccacgaccatttcgctgccgacctcgatggagctccagccggcctccagcaacgcgtcgcgctgttcgcgatgcacgctgtagaacaccggcgaaagcgaccgctccacgcaatactgggtgaagccggtcaggtcgtccatccactcggagggctcgccgaacggcccggtgcaggtcaaggcgatgccgttgagcacgcgatatgccacggccgatttgcccgtgggcgagagccagtagctgttgccttcccacgtagtcatgaagctcatcgattcgccgccggtttcgaccagccgctcggcgcgtgcctgcgcccgctcgttcgattcgctcacgtcgctcatccagcggatcaccacgaccagcaccacgatccagaacaccaggccgacgccctgatacacgatcgaggccatcggggtacgcggcacgaacgacaacttcatatggctcaggaagccgatgggcaggaagcgccccggcagttcggccaacagcgacgaggccgtggcacgcggcgagaattcatccggctgggcgatgccgtacatcaggtacacggcggcgcacgccagcagaaccagcacgatggcgccgacgccgccgatcagtcgccgccagccgacgcgaatcgggaaatgcttcaacgccgcagtcaaggcgacggcaaagaacagcggcggcaaggcgttcgccacgcaggcggtgatcgcgccgtgctgcagcagtgaggtcatgccgtccggcgcaaagctcagcggcacgatcaggtagtaggcgatggctactcccgcagtgaacaggttgatggccacggcacacatggccgcgaaccgacggccgcgatacaggccccacgccagcaccagggtcacggcggtgggcagcagcgaacgcagtaccgcgcccggcatcgaggctcgcaataggtcgaattgcaggaagcagccgctgtgcgtggcgccggccaggcagcgcgcgagcgtgccgtcgtcaacggagaccggactcatgagcaggccgaccgtgctgagcggccccgcgtgattatgcgaggtgatggcgatgatcggccccagcgccagcaccacggcgatggccgcaaacatgcgccgcgcctcgaaggaggtgctgcgcagccagtgccagccggtctcggcatgcgcgggcggcccggccatcacgcggccggccgcgtgtccgatcagcgcggcggcgagaatgcagtaatcgccaggattgccgctgtaaagcagcgcgaccagaatcgccacgtagccgatcagccgaatacgccgccgcaacagatggctgcagaacgcgctggccgccataagcgcgccgaccggcaacaccagcgggctcaaggcgaactgcatgcgggagacgaattgggagtcctggaacagccatccggccgccgcacacaaggtcaggcccacgatcacgccgccgagcgcgcaggcgagcgcggtgccgacggtacgtgcgcggccaagccacggctcggcgattgacagcatgacgagccacagcacggcatcaagaatgagctggatgacgccgcgcgccaagaacagcgtgcagaagagtttgccgaaatcgaattcggccatgctggtgtcgagccgcagcgggaacgcgaatccggccatcgcgaccaccagccacaccaccaagttcagcaccaccagcgccaccgtggcagtgatggccagtcgatgaccgtccgcccactgtcgcacgtcgccggccagttcgcgccagctttccgccgcatgactgttgtgcttacgcgattcttcgctcattgcaacacctccacttgtgggtactccttcaacgatttcgccatctcgcccaagccggtccgttcgccaaaccagtcgagaccgggccgccagaccgcctgcaccgcgtgccagtcgtggccggcgccgggcacgatcagctcggtgacctccatgccggctttgcgcgcggcggcggcaatcgtgcgcatgttgctaatcgattccttgtcccgttcgccagcaccggtgaacagcgcctgctcagatgtgccgctggaggcgatggcgttgaccggcacctgttcgtcgtatgccttgcggtcgccggcgaaatactcttggaccatcttggcgacgctgccattggtcggcttgagttcgccgtccaccggtagcatcgcgccgtagatttcgggatgacgcgggacgagctgcgtggtgcaggtgccgccttgcgagaacccgcccatcgcccacatgcgggccgatttggccacgggcagcatcttcttggcccagttcaccacgtctgtggtgaggtaggtttcggcgttgccttgcgtggtgtcggcgcacaggctgttgtgcgtggcctcgccgttctggtcgggcacgagcacgatcggcgcgagcccgtcatgtttggcggcgtacgcattcatcgtggcggcgatgttgccggcgtcgatgaggcgactggggctaccgggctgcccggccaacagctccatcaccggcaaggccggcggacggtcggacagcgcggcgggcggcaggtagatcatcgccttgcgggccgtgaagttggattcggtgttcggaatgtcgacggtgagcaccttgccttggctgggcatggacggcaggctgcccttccgcgccttgctatgccagtcgctgacactcatcgcggccttgtgtacctcgattgagccgagcgaggcgtacggcgtgtagccgacgagggtgccgatggtctggtattcgccgtaaatcgagtccacgccgagcgcggtggacagcagcaccagcggcaccagcacgacggccagcgcacggcggaccccgcgcagggtcacggctgcggcgatcacgaagccgacgccggcgatgccgcccgcgatggtgaagatcaccggccagcccagcgatacgccgaacaccataaacacgtcggacaccagccatgcaaccagcagtccagccgcgccggcgagcacggcggcaatcagcgagacaatcagcgggtgcaggcggccgcgcttcttgctcttgctcaatgccagcccaataatcagtatgattgccgcgatcgcggtcagtccgaacacggtccacggcacgattccgcggaccagagacaattccatgaacgttttccaaacggagttcttcatccttcacccccgcgctccaggctcctcgccttgtaagctcacgcaacactagcgcgcgattcatagagcgtcacccaatttcacaaaaattgtcgcgagttctcatggtttccccagactccgttcagcgcctgttcacatccggtctggcgcccgcagttcaaggccagtgtcggcgctggattagcggcgcgcaggcttgtcccagcttcagccggaagcagggaatatgctggtggatatgactcacgcaaacgaacaacgtccagcagcgaccggcaatgccgccgataacgtgtctgacgcccctactggccccgcgacgagcgcggcggcaaggcccacgaccgtcacggctgatggcacaacagccacaaacgccgcggccagttcaacagcaaagcccgcagccagcacctcttgggccagggaaaccaacccacgtcgagcactgttgacgattatcgtcacggtggtggttgtggtggccatcgtactggggctcggattcttcgtgaactggggattggcggcccttttggtgatcattatgattccgggggcgatttcgctggccgttctcgccaagcaccctgaatccaccggcgggcgcagcatgttcggcatctccgatccgaatacgctgcttgacccgattcgccgcccgtccgagcgtcgcggcgagtaagttgctgctgcccatcgggcggtaatttatccatggggcggtaaaaggcccatggggcggtttgaagaaattgtgaaaccgcagaataaagtcattttgggataccgccccatgagggttttaccgccccatgggattattaccgccccatgagcaaagtcaccccgctatttgcgcgcactgaccaagtaattgagcaccgatccggcggccaccagcagcgcgccacaccaaaacggcagcgacagcgccaaacccagcaacaccgcactggccccggtggacagcaccggcgtggcataggacgcaatagccagccgctccatagacccatgcagaatgccgtatccccagcaggcataaccaccgccaatcgccgccgcggcaatcagcacaaacagccatgcgaccagactcggaggctcggccggccacccctgcccggacgcgaagtggataatccacaacgccacggccacgcaggggaagaacaatgaagtgccgtccaccccatgactcatggctggcgtgaacaccgcgtacaccgaccaagcgagcgcgcccacgaacgccagcgcatagggcaaagggttggcggcgatatgctgcacggccgcatgccagtcgagcccggaattaccgccgaccgccaacaccacgccggcagtggccacgatcgcgcccggcagcaccttgacgaccgcgtgcttgcgatgggatacgcccgccgacagcagcaccatcatcgtgggccacagatagttgaccaggctcacttccaccgaggatgcgtcggtagaggccagacccagcgagagggatatcgacgattcgtaaaatacgaacaacaggccgccgataatcaggtatttcttggggaactcgcgaatcggggccgggcgccggaacatcagcagcaggatgccgccgaccgtgtagatcagggccgagccaagcgtggcgccgaagttttcggagacgatgcgcacggtgccggccatgaagctccacagcaggattgccatcaggccgatggtcgtggcgcgcgcggatacgacgtggccgccggaatggcttgccgccggtgccggtgtgccgcttgcgttctgtgcgccgttcgccatatgtccgcctctctcgcatcgtttcgaagtcactctacccatcggatgtgtacagcggcagaacggcacgcgaccggcgcgcgaacagggtggggttcggtgattgaaacagcaaaatgccgggtagggtaaatccctacccggcatttgcattggctatgtttcccgccgtctgtcaggttagtcggcgttgaaagcgtagggcagacggcgtgggaagcatggtttggttacgatttatctctcccccacccgcttcgcgggagccccctcgtcagagggggcaaagctactcgaagcgggacttcgggacgaatcaagtatcgtcagccctcaatcgcgatttggtgcttggactcgacttgcggctgggcctgcatcttcggaacctggatgcacagcgtgccgttccggtagctggcgtggatgtcggactccttcacgtcctcgccaacgtagaagctacgcgagcaggagcccatgtagcgttcgcgacgcagccacttgcccgaatcggacgcgcaagcacacttgctgtcggaagcctcgtcctcagcggccggagccttgtcctcatgctcgctgcaacgcgaggcggacacggtcagatagccgttgttgagctcaaggttgatatcttccttcttaaagccaggcatatcgatgtcgacgtcgtaacccttgtcggtctcgcgcacatcggtagtcatcatgttggcgggcattacggcactcatcgtgttgtccgtgttgcgccaaccctcaaagaacggatcatcgaacagatccgagaacatcgtgtcattcatcaaagccggaaacattgccataatcggtactccttgattaggagagaatcggcttggctgccggccgccaacccgtatcgcggggctagcagcggttatcgtggccggttccggaaccctcccgggctctcaacctttaaccttcacttcatccaattcccgagcgcggcaatcattccgggattatgcccacagagaaattgcggcgggaatggctgccggtaaagccggccgagccgagcgccgtgaccaccctcagccagtcttacggctgccagctcccgccagcgggagcatatatacgcacaccagtaggcgtactcatatacctctgccaacgggagcatggttgcacgttcccgcaaactccgccaacgggagcatgctggcgcgcgaacggctcacatctgctgggcgttttcgagcaaggcgtttttgaggtcggactcgatttggcgcatcttgacctgggcggcctcgcggttggcctcgccttccttctggatctgcacggtctccttcagggtggcgatgagttcggcgttgatcttctccagcgtgtcgatttccaccacggaacgctggttggccttttccgcgtccactgcacccttgtgcagggcggccgcgttacgcgccagcagcttgttggtcacatcgtcggccttgttctgcaggtcgagaaccttgcgctggttggacaggcccagcgcgatcaccatctgactcttccacaccggaatcgtggtggagatggtggtgtcgatcttgtccacgatggtctggtccgcgttctggatgattttgatctgcggcgcggtctgcaaggtaaccacgctgatgcggtcgaggtcgtcgagtcgcttggcaaaacggtcgagcttggacttgaagttcttcagcacttgcgcctgcatggcgtcgccactggcggcggcctcggcctccagcgctggcagttggttggcgttgaagtcggcgagcgccttcttgccggccagtacggtcattttcagctcgcggtattgctgggcgttctgcgtgtacatcgtgtcgtacatggagatgtcggccacgagtttggcttgcgcggattggagggtggtgatgaggtgttgcatggcatcgttgttgggcagttcggatacggccgggatctggtcgagcgtgccggccacgccgaatcggctgatcgaatcggtgccggcgaagttggccgcgcggaagccatggcgctcccacgccagcttctgcaccgccggtgttttcaacaggttcagcagtgtgccgccttttctcggccaaggccatcagcgtgtgggtgctccacacggtcggcgtcgggtagacgatgaccacgtcgtccttgatctgcttgaacgcatccgtctggttcacggccaaatcaagcacatgtgatacgcgcccgaattgtccttggtcacaagtccgccgttcacgagcccgtccgccacggccttgtgcgtgtatagcacaatcggtgagttgaagacgatgtcgctttgggggggccttgacgcctttcgcattgccgtattcgacggccgcgcgcgaggaggggaacaggtaacccatgcctttccggtccgtatccatcatggccggcgatccggccttgcgatagtcgatggcaatgccttgcttggcggcgagcgccttgaacttggcgtcatcgaacaggccgattttctcgccgcccaggtagccggtgatgctcacctgttcggtcggttcggccggcgctggttgcgattgccgccacaccagcgtgccgcagaccacgcccactaccgcaagcagggcgatcagtccgatgatttttgatttggagagtttcattgtgcgtccgttttctggtccgactggtgagccgggccgccagatggagtctgactgggtgcatgccgtccttcatcagcagccgaggaaggcacaggcgaaggtgcgacgtcgtcgtatccatccatgcgggccaaccgttggatggcgtcggagtcggccgtaatgcccaacgtcttggcgcttaccgcccggctgagttcgccggcggcggtctgttcgagcacttgcagcgcctcgatggtttcgattcgtaccgtggctatctgatcgcgtgcgccggaactttccacgtccacgtaggagcgcaacagtttctcggtctgctcgccgtacacggtgatgtagtggcgcaacgtcgggtaggcggaggtgtctcgggtcacgtattgcactcaatctttggtagcggcgatgaagtcgttggcttcggctttgacggctgggtcacgtacttgcttggtgagcatggcgatcgagttgagttgagcgttcgccgcgtcgatcgtatcggcggtcttctgaccgttgggcaaggcggaaaccagcattttgccgatgcgtcgctccggctcggtgagcgtggaggcggcgatatacccaagtgcggccagtaccacggccacgatcaggccgggcactccgccgccgaccagtccgaaaccgagcccggcgagcagcagtccgacaacgaatccacagattacctggagcatcagttgaagcccttgacttggcggaagacggcggcgaggtcgccggagcggccgtcgaataccttggcgttgctcagggtggcgagagacttcagctggctgggatcggcatcgccgaacagggttaagggtcaaaaagtgtgtccggaatcgcggattttcacggattgacctgtaggtttccggaaagtatatgctccggaagcatatatctagcccccgacgggaaatcctcggtgtggcagccgtgatgtgctatgcgcggcgtggtgtggtgtcgcaatgtcgaagaaccaaccacgctgccactgcggcggtgaaatgaaacgcaacggcaccaccagcaaaggcaccaccagatggcgctgcaaacaatgcggcgcctccagcgtcaaacgtcgaaacgacatcaccaacgcggcagtgttcacccagttcatcgagcattgcaccaccgcaatatcactcgacgacctagccaaacgaaacggtgttagccgcgccaccatgaagcggcgcttcaagtggtgctggctcgttgatgtgcctgaccccaccgccggccaccacaagcggatctacgaccaggtatttctcgatggcacctacaccgccggtggctgcctgatcgtcgcggcgaccatcgaccacgtgatcgcctggcactggtgcaaacacgaaaccacccgcgactaccaactgctgcttgaacgcatcgaagccccactcatcgccgtcatcgacggcggccaaggcgcatacagcgcaatcaaaaagtgctggccgactacgaaaattcaacgctgcctcgtccacgcccaacgcgtggtccgccgctacaccaccaccaacccacgcaccgatgccgggcgcaccatctaccgacttgcgctgaaactgacccggatcaccacactggatgaagccgccgcgtggggtgtgcaactgcacgagttttcaacgatctaccgggaatggatgaacgagaaaaccatgatcaaagaccccaaaacaggtgcatggacccgcgtgtggacccaccacaacgtgcgcaaggcctacaacagcctcaaccatctttggcggtccgagatgctgtttgtctacctcaacccgccagcaggagtccttgcgcccgagcggatcaaatccaccaccaacagcttagaaggcggcatcaacgcccagctcaaactgctcgccagaacccaccgcggcagatcaggcgaacgacaacgccgcatgctggattggtggctctacttaaaaacggaactgcctgacgatccagtacgaatcgccaggcagtccgactggggccagggccaactcgccaaagtatccaccctgacccaaaccgagaaccaagccgaccacgaaacaggacgcccagccctctacgacaacgctatcgacaccgactacacccactcaatcggcattcaaaaaggccaaatctaacccccgcgacacgccgagccagacacacattttgacccttaacccgccgaacatgatggagaagatcggcagatcacggccgcgcgacttataggcgctttcgaattcgtcctgatgatcggagttggagcggccgtcggtcatgagcacgatggcggtggtgtattgcgaggcttccgactcgctgggcagctcgtcgagcgcgctcagcaggccttcatagatatcggtgccgccgctggcatcggtggcatcggcctcatgcagcaggtcgctggtgcttgtgccagtggccttgaccgggcggtggacctcggtttcaaacgggatgagaatgttcacgtcgccgctggcgggctcgatgtacgacttcttggcctggtccgggtcgagcgccgcgttcaggcctttgaccacgccgttcttgccctctccagacatcgaaccggagtaatcgaccacccaaatggtccagctgggtttcctgagcgcggtctggtagacgttgagcgcgctgtcgatcaccgtggcggaggtcatggagaacgtgagtttgccgtcgctgaccgcggcgaggatgtccgcggtggagacgggcttggtggcgccggtgtcgtcagcccagccgagtttgacggccttggatttggcgatgccgaacacgatcggcgtggtggaggtgctggccgcgtctttgacgatgtgcttggtgtctcccatcgaaatccacatcgaggaggcaggccagacggcgtcgtgatcctggccgccggccttgagcgcgttcataatctccagcgaacccatgtagtgcatcgtcacggctacgttggattggtcggccgctttctggatggcgacggcgacttccttgttttcggagccggaggcaatgctcagggtggcagtcggtttgccgccggacggctggaaggtctgcgtggtggcggacgtgccgttgccgtccgctgtgccgtcatcggaattattgaacgccgtgcaaccggtcaacgcgagcacgccggcacataccgcggccgcaaccgcggcggcggagagaagacattatgcccataattccatggctctcccgccatctaaagcgggtcgggccacaaggtgaccgcacggtgaacaatgggtgaagagctacatcagtacgcggcgcaggcaatcatggggtcgtcgtagaagccgaggatcttttcgaggtagggcttgtaggtgctgttgggcatggaaaagatttcgtggcgcgattcggggaagcgcacgatgttcgcctcgccgccgccgtccttgaccagttggacgaagtgattctgcggcttattgagtacccagatgtcgcgtccggactggaagagcagcaccggcgtctccacttcggcgcaggcggacggattcagtatggcccggttgagcttcaacgcctggcgcacccattcgaacgccgcgcagtaggtctggtattcgcggttctcgcaacgcagcttgaagtaccagcgttcacgcgcttcggaagcgccctcgttgccttccatcgagaattccggcgtgaagtccgactgcccgaacacgcgcttcttgccgaagccgagtccgcacagcgcgccgaccagcacacgggccacgcccagcggcatgccggtggcgggggcgatcatcggggcggagagcaccgctttgtcgaacagggtggggtatcgctccaacacggccgcgccgatgccgccgcccatcgaatggcagaacaggttcagcggcatgccggccgcgtactgctggccgatggtttcggcgaagccggccagatcggccacgtagcgctgccagtcatcaatccacaccatgcagcgattgtccacgtcgcgcgcggacttgccgtggccgcgatgctcgagtacacacaccgagtagccggcgagcagaaaataccagacgagctcgtcgtatttctcggcgaactcggtgaagccgtggctgatgacgatggccccgcggaagatggcggtggcgccttgctcgcgaatcgcgtcgaatttggcggagtcgtagcacaggtagtgcagctggcccgagcggccgccggtgtccataatgccggacagcggctcgatcccggccgaacgttcggcggcggacggatcgaaccagccctcctcgcggcattgttcgagcgcgggcagcaccacgtcggtcatcgtttcggcgtacttgttttcgtcgatcatcgtcacctgcatggttcccatcttaggacaagcctcacgcccacacctcgcacccacacccacgacacaatcccgggaatgttgcgctaatcggacctaccgagacccacttcgcgaaacaatcccgggaatgcgtcgcaagactgcgcgccactgaccgcacaggcgcgtaggttgtgaggtatgagcgaaaccaatgatgtcaatgacgcaatcaagcatttcccacgcctcagggcgcgcacgctgcgcttcggctgcggcgcgccgcgctccgcacagaccgtgggcgacggctcgcgggccctgtttctgcgctccgacggccccgaggatctggtgaccgcactgtggctgagctggttcgacgagtccggtgaacaccatgagaccaagctggccgatccgcgcgaactgctgggcgcaaccgccgacagcgaggacgtgccggccgaggagaaggcccgccgcgagcgtgcgcgcgaaggcggcaccggcatcgtcggatactccgcaggtgacgacggcaatcgcatcgtgttcaccatcaacggccgcctgttcctgaccgacatcgattggaatgacgagaccggcgcacccgagccgcacacccgtgaactggccggcgaatggctcgatgaggacccggcgatgtacacgccggtgctgaacccgcgcatcgccccggatggcgaacatgtgctgtacaccacgggcagctacctgatgctggtcgatatcggcggcgaactaggtgaccgcatcaccgccgtctacggcgtgagcgtggaggatgaggacggcaatccggccgaaaacacgtggaaaatcggtctggccgagttcgtggccggcgaggagatggaccgatacgacggcttctggtgggccccggattcgcagcacgtgctgttcgagtccttcgacaccgccgacgagccgacctggcacatcagcgatccggctgaccccgagaagccggccgccggccgccgttacccgcgcgcgctgacccgcaatgccgacgtgtatctgaccgtgatcacgctggcgttcgatgagaacgaccggtacgcaggcatcaccggcaacgccgatgtggattgggatcgcgaggcgtacgagtatgtggccgccgtgaactggcgtcgcggccacgatccgctggtgctggtgcagaaccgccgtcagacccgcgatcaggtgcttgaggtggcagtcgcggcggatggggccgcgctgggtgccacgcgtgtgcttgaggagcacgcgaacgagcagtggatcgacctggttcacggcacgcccgcctacacgccggatggtcgtctggtgtgctcgctcaacgatatggccacggacaccaaccgtctgacaatggacggccgcccgttcacgccggctggctggaacgtgcgcacggtgctcgccgtgaccgacgaggatgtgctggccgtggtgcagcgcgcgcccgaaatcgcgcctgaggtgccggacgcttgggccgatgcggccgccaccgagtccgtattcggcgaccacgacgcccgcagtttcgacgtggtgagtatcgattacaacggcacgatcacgccggtcacgaccgatcccggccagtggaccgcctcgcgcggcgagcgcggcatcgtggtctccggccgcgatatgcgttccgcccgcgcccagatgcggcatattctgggagaacagagcgccactatcgcgtccacggcggccgaacccggctttacaccgaacgtcacgtttacgcgactgggcgagcaccagctgtacacggcaatcatcgcgccgagcccggaaagcccgtacgcgcacgccgagaagctgccggtgctgatgaagccgtacggcgggcccggcttccagcaggtcatcgcctcgcagtccttctactgggagggccagtggtgggccgaccaaggcttcctggtggtcacggcagacggccgtggcaccaccggccgcggcccggcatgggaccgcgagatcttcgaggatatgaaggacgtaacgctggccgatcaggtcgaggccgtcaacgccctgcccgaggccgtcgcccggctcaacgccgatgtggaatcacgtgcggcacagccggctgcgggcgatcaggcagacgccgagaaccacccaccggcgcttcgcgccacctcccgccagcgggaggcgattcccatgccggacctcgacaaggtgtgcatgatcggctggtcgtacggcggcttcctgtccgcactggccgtgctggacgcgccgaacgtgttcaaggccgcatgcgccggcgccccgcccaccgactggacgctgtacgacacgcactacaccgagcgctatctgggcctcgacccggatgtctactaccgaaacggcatcgtgcaggacgcaccgaaactcgagcgcccgcttatgctgatccacggtttcgccgacgacaacgtcaccatcgcccacagcctgcgcctctcgcaagccctgatggcggcgggtcgcccgcacaccttcctgccgttgacgggcatcacccatatgaccaatgacgagaccgtggccgaaaacctgctcaccctccagcgcgatttcctgcgcgacgcgctggcctgacaaatcgataacacgcgcatcccacccgaggtgctccaccggtaaagcacctcgggtggtgcgccgcacccatttccgccctgaatttttggatattttgcactcatcgtcacgtgaaagaccggttttttgtctcatattcccatcaccgcgtaggatgggtgaagattagaaagggaggactatgagcgttctcgaccgttttgaaaaaagcgtggagggtgcagtcaacggagtattcgccaagtttggctccaaagacctgcagcctgtcgatctttccagcgccttggagcgcgagattgacgccgaggccatgcccgtgggccgtgaccgcacggtggccccgaatgaataccgtttcaagctcagtactcctgacttcgaccgtatcgaggcatggggtagcgagaccctggccaacgaactggccgataacctcaccgagtacgcgaagagccagcattacgccttcgtgggcccggtgatcgtgatcttcgaggaagaccttgacctgtccaagggcaacttcaacctcacctccgaatccgtgcagggcaatgccgtgccggtcaccaccgatgcgcagaccgaggatagcccggtgctcgaggtgaacggcaaccagtacctgctcaccaaagacaagacggtaatcggccgcggttccggttgcgatatcgtcatcgacgatccgggcatctcccgcaagcacctggaaatcgacatcacggataacggcgtgatcgcccgcgacctgggttcgaccaacggcacgtacgtggagggccaccaagtgcccgccgccacgctgctcgacggcaacaccatcaccatcggccgtacccgcatcctgtactgggcctccgcccaagcccaggagtagtcgagcacacgcccgaaagtcgtccacttatgaccgaactgacattcgccctgctcaagtatggattcctgatcctgctgtggatattcatctggctggccgtacgttcgctgcgcaaggacatcgagacgttcagtccgcgaccttcgcgcgcgcgtcgtcgccgtgagcgtgaagtgcataaggccaaggccgaaacgccgcaggcagctgcgccgcgcccgcatcgccagcccagcgcttccgcgtcgtccgccgcctcggcgcagcctaccctgttggtcatcatcgatggtccgcttgccggcagctccgtgccgctggccgaagccgacatcacgcttggccgcgccgcctcgaacaccgtggtgctcgatgacgaattcgtgtcttcccaccatgcccgtgtctaccgtgacacgcgctccgggcagtgggccattgaagacctgaactccaccaatggcaccgtggtcaaccagcagcgcatcaaccgccccaccattctgcccgctcgtattcctgtgcgcatcggcgccaccaccttcgaactgaggtagccgcatgccaaaatccgccgcttcacaaccgctgttcctgtattccaccacggtgtccgatgtgggcaccgtgcgcgcgaacaatcaggattcctccttcgccggcgagcatctcatcgccatgtgcgacggcatgggcggtcacgccggcggcgatacggcatcctccatcgccatccggtcgctggcccacatcgagcaggatgacaccggtggcaacgtcgagacgatctcccgcatgatggaaacctccgttatggccgcgcatgacgccatcgtcggcaaggccaagcgcgaacgcaagcttgccggcatgggcaccaccgttaccgcagtggcattggtggccggctactgggtcatcgcccatatcggcgattcgcgcgcctacctgctgcgcgacggacgcctgagccgcatcacgtgcgaccacagctacgtgcagcacctcatcaacaccggtcgtatcaccccgtccgaagccaagaaccacccgcagcgcaacgtcgtgatgcgcgtgcttggcgactttgacattgacccgcgcccggatatttcggttcgccgagcccaccccgccgaccgttggctactgtgctcggacggcctgtgcggtgtgctggaagattccaccatcgaagagacgatgaccacgctgtccgatcagggcgaatgcgcgcagcgtctggtgcagatggcactgcgggcgggcagcaccgataatgtcacggccgttattgcggatgccacgttggcgttggatgccgatgcgttcgacctgccgcaccaaacgccgttggtcggcggtgccgccagccgtaatcttgagccgattgccgacatcgtcaacgagccggtggctaccgcgcccgcactgcgtgaggatgattcccccgcccagcgcgccgcagcattgattcagcccgccagcgcgcacgaggcggagaccacgcaaaccacggccaaaccgtcgtccacacgcgtggtgcagccgtccaccgtccgcgaggagaccggtgaacgagccaatcccgataccggtgagattccggtggtgcaaaagccggatgggcgcctgtccgccgaccccaacgacccggatgtggccaaagccatccgcgatgagcaggtcgagcagaagaaggccacgcgcaccaagaagcgccgcaataagcttgcggtgattattacctgcattcttgccgtgctggcattggccggcgccggctggggcgcgtacacgtggagccagacgcactactacgtgggagatagcaacggcaccgtagccatttatcgtggcgtgccgaccaatctctttggacttgagctttcgcacgaagtgcagaccaccaatatcgccaccgcggacctgcctcagacatggcgtgaccagctgagccaaggcatcacagtcggttcgttggacgaagcgcagtcgcatgtgggtattatccgcaccgaaatgcgcaaactggccaagcagcaggaagccgacgccgccaagaaggccgaggcgtccaattccccggacagttccaaagacagttcccagagcgattccaaggacggcaccaaggattcgtccagccagtccggctcctcgtcagacaagtccggttcgtcaagctcatccgattcctcggataaatccggtatcggagcggccgacaacgcggccacgggagattctcaatgatcgctacccgtctacgtcagatttctttgttgctgattgccatggcaatcagtgcgttggcgttcatccagatgttccagcgcaccgccggcgaattccctatgcaatacgccggcatgctggcattggtcgtagtgctgtttctggtgctgtgggggctgattgtgcgcttccagccgtacgccagccagtcgattctgccttgcgtgctactgctgaccgccactggcgtgaccatgatcgcccgcatcgaccagagcgaaggttgggcggttgcccaacgtcagctgatctggctgtgcatcgccatcgtgctttccgcgctgctcatcatcttcctgaaggactaccgcgtgctacgacgcttctcctatgtgtcgatggtggtgggcctggtgctgctgctcgccccgatgctgccgttcatcggcatggaggtgaacggcgcgcgcatctggatcaggattccgggattgggccagttccagccgggcgagttcgccaaactgttcctcgcgttcttcttcgctgcctacctgttcgatcatcgcgaccagctggccgtgggcggtaagaagatgctcggtctgcagctgccgcgtatcaaggatctcggcccgatcatcgtggtgtggatcgcctcgatgggcgtgctcatcatgcagcatgatctgggcacctcgcttatgttcttcgccatgttcgtggccatgctgtacacggccaccggccgtaaaagctggatcatcatcggtctgatcgcgttcgccgcgggtgccgtgctggccgcaggcatgttcagccacgtgggtcagcgagtcgatgcctggctgcacccgttcagcaacgagcaatacaacaagacccccggcggctcctggcagctggtcaccggcattttcggcctggcatcaggcggcatgctcggcaccggtctcggccaaggccatccttcgctcgttacgtttgcgaactccgatttcatctacgcctctctgggcgaggaactcggtctgatgggcgtcctggccattttgatgctctacctgctcatcattgcctccggctttatcaccgccatgaaaatcaaggatggcttcggcaagctgctcgcttccggactggtgttcaccatggccttccaggtgttcaccgtggtcggcggcatcacgctggtgattcctctgaccggtctgaccctgccctatatggcggccggcggctccagtctgatcgccaactatattctcgcgaccctgctcatcatcatctcgaactcggccaatgcgcccgagccggagctgacctcggatacgttccagtacgaggctttggccgtgctgcgcaacaaggaacttgaggcccgggcccgcgccactgagccgatcgttcagcctcgcagcgcgtcggctacggcgtcgcagtccgagtcggaatcgtttgacgaccccatcgtggataccaccactccgtcgtatgccgaagccgatgaaccgtacacgcctaccggcacgattcccccgcttcctcccgttaacggaggcactcgcgtatgaacaaatatcttcgtcagcttttcaccgctgtggtcgcgctgttcgtgattctcggcctgtcgtccaccatcatcatggcggtacgggccaacgcgctgaacaacgatccgcgcaacgcccgttcgctgtaccaccagctcggcgcctaccgcggtgccattctggcctcggacggcacggtcatggccaaatccgagccggtcaacgacgcgttcaaatacctgcgcacctattccaacggtccgctgtatgctccggtcaccggcttcttctccattaaccagaccgccgatcgcggcctggaagcctcccgcagcatgctgctcaacggcgaggccgattcattgatctggcagcgggccaaggccatgctcaccggcgctacggatcaaggcgcgtccatcgaaacctccatcgaccccaagctgcagcaggttgcctacgatcagctcggcacgcgcgatggtgcggcggtggccatcgaagtcagcaccggccgtatcctcgccatggtgagcacgcccagctacgatccgaacaaactggcgacccatgacgccaaagccgcgtctcagtcctacaacgaactctctgcgggccaaaatagcccgctaatcaaccgcgccacctcgcagctgtacccgccagggtccacgttcaagaccatcgtcgcctcggctgcgctggaaaccggcgattatcagacggacacgaagattcctgcgggcgccagctataccttgccgggaaccgccacacagctgccgaacgacgaggcacagggcgatggcgtcaacggacagatctccctgcaagaggccgtcgcatggtcgtccaataccgcgttcgcccagcttggcgtgaaactcggcgcgagcaaggtttcggacatggccaccaagctcgggttcggcagcaccatcaccattgacggcaccgaatccacgggcaccccgatgacggccaccgcgtccacattcccctctgatccgaccgacgacaagcttgcgctggcatccatcggccaaggcgacaccacggccacgccgttgcagatggcgatggtcgcgcaggcaatcgccaacaatggcaaactgatgcagcccacgctggtcgatcgtgtgcgcgccgccgatctcaccgtactttcgcagaccaaaccgcagaccatggccaacgcgttcagcaaggattccgcagacaagctcaccacgatgatggagagcgtggtgtccgaggccaatccgcagctggccatcgacggcatcaaggtggcggccaaaaccggtaccgcacaaatcggtatcgacaactctgccatcgacggctgggtgatcggtttcgcgccggcggacgatccgcaaatcgccgtcgcggtgttggtgcataacacagatgtatacggttcgctcgccgctggcccgatcatgcgcgcgatgatgcaggaggctttgcagcagtgaaacttatcgaaggacagcttattcaccgccgatatcgtcttgattcgcgtcttgcgcaaggcggtatgggcgaggtctggaaaggctacgatattcagctcggccgtgaagtggccatcaaggcgctgcgctcggacatgaccaacgccgaggccaagctacgccgtctgcgtgccgaagcccataattccgccaatctggcgcatccgaatatcgctgcgttgttcgaatactacgagcatgacggcatcggctttctgattatggaatacgtcccctcgaaatcgttggcggacctgttccacagcaagggcgcgatggatcccatcgaactgctgcccatcctgattcagaccgcgcgaggcctgttcgtggcccactcgcacggcgtgattcatcgtgacgtcaagccggccaacatcatggtttccgacaccggcgaagtgaaaatcaccgatttcggtgtgagctactccacgggtcagggccagatcacccaggacggcatggtggtgggcaccgcacaatacatctcccccgagcaggcgcagggccagcaggccacgccgcaatcggacatctattcactgggcgtagtggcgtacgagggccttgccgggcatcgtccgttcaccggcaccactccggtcgatatcgccgcagcgcacgtgaacaatcccgtgcctccgctgccggactcggtggacgtccagttacgcgaatttgtcatgtcaatgctggccaaggacccgttggatcgcccgaaagacgcgctggtggtgtcccgtacgctggcacgcatcgaacgccgtctgctggatcagcagaccgaaatggccgacaccgccatggccacgtccggcaatcgactgccgcgccgagtgaccagcacgccacgcattgttttggaggccccggcctcaagattgggagggaataagcaatgagcaccagtatgcccaccgcattggccggcggacgctaccagcttggccagctcatcggtcgtggcggcatggccgaggtccacgtggctcttgacacccgtctgggccgtaccgtggccgtgaaaatcatgcgcgccgatctggccaacgacgacatcttcctggcccgtttccgccgcgaagcacacgccgtggcccagatgaacaacccgaacatcgtgaacatctacgattcgggagaagaactggtttcttccgaaagcggcgatgccgagcgtctgccatacatcgtcatggaatacgtcaagggccagaccctgcgcgacatcatcaaggtcaacggcgcactcagccagcgcgactgcgaacaggtgatgttgggcgtgcttaacgcgctcgactattcgcatcgcatgggcattatccaccgcgatatcaagcccggcaacatcatgatttccgagcagggcgtggtcaaggtcatggacttcggcatcgcccgcgctctggacgattccgcagccaccatgacccagtcgcagggcgtggtgggcaccgcacagtacctttctcccgagcaggcgcgcggcgagaccgtcgacatgcgttccgacctgtattccgccggctgcgtgctctacgagatgctcaccggccgcccgccgtttaccggcgattccgccgtggccatcgcctaccagcatgtttccgaagtcgccacgccgccatccgccgtggtgccggggctgccgaagatgtgggattcgatctgcgccaaggccatggccaaggaccgccagaatcgctatgccacggcctccgaattcaagaccgacatcctgacctacatgaacggcggcgtgccggtggcggccgcgttcaacccgttgacggacctgtcgaatatgaaggcccgcaaggaagccgaacgtgatttgcccaccacgccggtggaaccgcatcagcaacccacccaggcattcaacccggtgaccggtcagttcgagcagattccaccggccaatggtgccaatgcagcggcgttgcagtcccgtgcgcagcagcgtgcggcggcggccaaggccaagaagcgcaagaagatcatcatcggttcggtgatcgcagcgattgttgcggtgcttgtcattgtgggcatcgtgttcgccatgaacggctccggcaacaagtcctcggaagacaccgtcaccatccctgaggtgtgcaacgcttccacgtccaaggacaacatcaagctcaagcttgaggcattgggtttgaagatgaccgaaaagcaagacaccgactccaccgagccggaaggcacctgcaccaagatgagcccggacgccggctccaaggtggccaagggatctgccgtgaaggtgtggttctccgcaggcccgcagtccactcaggttccggatgtcaaggaacgcagccaggaagaggcgcgcagcattctggaaagcgccgggttcaaggtgaacgccgccgtcaaaaccgaagacagcgccgacatcgccaaggatatggtgacgaaaaccgatcctgccgccggtcagtcggttcccaagggcaccaccatcaccatatatgtttcttccggcatgaccaccgtaccgagcaatttggtcggtcagtcgaaggacagtgtgctacagcagtatgagggcaagttcagcttcactgtggagcaggagagctccgatacggtggaggccggtctgattacccgtgtaagccctgattcgggctcttccatcgcacagggcgggttcatcaccatttgggtgtccacgggcaaggagaaggtcgctgtgccgaatatcaccgctggcactgactacgtcaccgccgaactcatgctcaaggccgtgggcctcaaggctcaggccaatggtccaaccggtagcaccgctgtggtagtcagcatcaatcctggcgctggcagccaggtagatgcgggatcgaccgtcaccattaccacgaaggccggcagcactggcggcggtaccggtaccggagacggtggcaacggtactggcaacgggggcggaaccggtgagtgaaccggtgagtagcaagtaagcgccgggcgtgtatgtgttgcgcatatgcaacgcaaatagcgcaacacatacacgcaacacaaaggggaagggcttctgcgcccctcccctttgctgtataaagagctatcccagcgcaacaatcccgggaagcgtcgcaaaaccagtacgcaagcctcgttctagcgacacattccggggagagtatcgccgcgcggaaaagctacttcgtaaccttgggctgaaggccggcggacttggccacggcgttgtcttggccgcagaccttaagccagttggccagcagacggtagccgtcctgggtcatcacggattcgggatggaattgcacggcgtacatcggcttgcccttgaccttgatgccctgaataatgtggtcgccctgcgtccacgcggtaaccaccagcgtatccggcaccgaatcgggctcgacggccaacgaatggtagcgggtggcggtcatggggttggccacgccctcgaaaatctcgtcatcgatatgttccaccaagctggtcttgccatgcatgatggtgggcgcatggcccacagtgcagccatacacctcagcgagcgcctgcaagcccaggcatacgccgaacatcggcacgccgctggccgcgcacaggcgaatcatatcctcactggcaccggattcggccggagcgccagggccgggagaaatcagcacgccatcgtaaccgtccagtacacccggcgcggctgggtcgatagcgtcgttacgcaccacatcaacagtggcgccaagggtttgcagatagcctacgatcgtgtagacgaaggaatcgtagttatccaccaccaaaatatgcgcggaatcggtcatagggctctccttgagggacgtgtactgcaagccatagtactaggctgccgtcagctcactgccacgaagttcgacatctgctgtaggaatgggatattggcggcggcccaagggaatccccactggaacagcgccgcggcggctgcgaacagcagcagagccagcagcagccatcgaatcggtgccacgccgggctgcagacgcaacagtccgccatagatgctggcatccgggcggcgacgctcacccgcgcgaatctcgcgcagcaccggccagcgccatgccaccgcagcggcgatgaacagaaccagccacactaccagcgcgccgaataccaccttgtccagcgagccaatgcgggaagcgatcgagggggtttcggtggtggagaacttcactgcaccggacgaatcagtagtagccagctctttgggcacgccatcagacactttggcccagtacgccaactcaccatagctgatccatcgttgggtgggggtggagtatttcggctcacaggtggtcagtgtgatcatgcgtttggtgggattggcagtggagtcttccggattgggggcgatcacatacacgtccgtgggcagcacaatcttgtgccgggtgtagtggtagacgtaccagtaatccttggtacgaacgatgatgggatcgccttcctgcaacttgtccacatcgcccaacggctgcccgtagccgttgcggtggccggcgacggcgaagttgccgacctgccccggcatctgggtggtgtcgtaatggcccagaccgtggcgattgagctgctcgagcgtggtgccttccacgatgttgcgatgccattgggagccgaagcgcggaatgtagatctgcgcaatcaagtcgccatatttcgcgtctttcggctgtactggagcatcgccctcctgggctttggcgatggtgaccgttcccccgttgttgctggggtcgctccagtcgacggactgggtggtttcgttctgggctcgctccgcctcgacaccggtccaccacatctgccagacgatgtacagggcgcaaatcacggcagcggtaatcagcagttcggcgcagatgccgagtgcctgccagatcaggctccgctggggcgaagacgcgccgcgtactgcggcacgacgggaccttgccctgctggcattggccgggtctgccgccattcgtgcggcgtcgtcctcggggaagggctgtacgtccgacacggacgcgagatcaatgggcgccggtgcgccgctgttgtgcctgccgtgtctcattgctgagtctgctcctcatctgtggtctttgacgtatcgaccgtggcatatttcaactgctgcagcaaggcggcggtagcggggaactgaaggccctcggcattctccaccttgtagccaatgccaaacgcggtcacatattgcttaagaatggtaatggcttcggagtcgttcaacgctgcgcgaagtctttgtgggtcaccaatcgcggaaatggtgaatggcggcgagtatttcttaccgtgcaacgacagcacgttgccggaacagatgaccgccgaattgaacagcacccgctgatccataatcatcagcgcatcggcaccgccggcccacaaggcattcaccaccgattcgacgtcctgctgatgaatcacgtaatcgttgatattggcggtcgtgccattgttgttgacggcgttctcccataacggagaatcatccagcgttaccgttacgccgctgccgctgagcgcgggcagcatcaggctggaatccacattgctggagtccttgccttggttctgcgtgctgtcagtaccgtcggtgccatcggccttgagcgcgtccgtaagattggcgacctgtttggtcagatcgctgacgtcctgctgcagctggttggcctcgtccacgccttgctccaccagatcggccgtatcgttggtggcggcaaccgtacgattgaccctcacgttggtgctcagcagaaaaccggtcaaggcaatgacgacgaataccgcgacaccaccccatagggagtgccgtgcgccgtgcttacctacatgtctggccatgaatttcctgtcttcttgccgactctggtcgccgctttcgagtgtagccactattatgacttttagcctattgaatggagactatgctgatggctgacgaagagctgcacgaaaccgactcgaacaaccagaaggactggcagagcgagacctcatccagcaccgctgctgacgagaccgccgacaaagacaccgagcagaacgcagagaacgcttctgccgaggaagacgcggcttacggcgtgaatatggagcaggtgcaggccgtgctcaacgccactgccgataaggccacgctgaccccgcagatgcagcgcatgatgaaccgtcaggcggagaacaccaagcgtgttgaagaaaccattaagggcaccaagtcgaacccgcgttggttcgtgccgctgttctgcgcgtttatgatcatcggcctgatttggtgtgtggtgtactacctctccccgtccggttcctggccgattccgaacatcggtgcgtggaacctcggcatcggcttcgccctgatcatgatcggattcctgatgacgatgggatggcgctgagttccggctcgttgcgcttatctatcggtagattgttttttctatcgttaggttgtccttaattcttatgagaaaggccgacctcccgtatgcggaggtcggcctttttcgtgccttagcctgttcatccacagctatccaccacttatccacgacttatccactacgttatccacagcctgtggatgaattacacccatgtagttttccaccgaatgtggaaaaccatgtggataagtggtggataagcggcgtttctcggtgtatatctcgtgcataactttggcttggcatacatcgccacagcgagggaacagttatacacccgagttatccactgcaacaaacccaataataccgcggcattcctaacttatccacataagttatccacagtcttatgcacttttctacacacttgtgcacaagtcaccattgtggataactcattatcgtggataactcgtcattgcgcgcatctcattactgtggatatcttcatacggcacacacccactcgccgaacgacgatatccacatcgctaatatccacatcgtcgctttccgcacatacattgatgccgggcactgcatgttccgcaatacccggcatcaatcgtttttttttacagccatatcaagccatatcaagccatatcaagccatatcagtgcagggagccgaaactcatccacccgtaaggattggccatattgcacaacagaatcaacgcaatgaccagcaccaccatggcccagccgtacacctgcatgcgccatttcaggcttttaccgcgccacgccggcacaccacccaccagcagccatgtgagtattccacccactacaaagccgccgacatgcgcctgccacgccacgccaccgaccacgaacggcaaggcgaagttcaccgccatccagatcaacatggagcggatatcggcgccgatacggcgatataccaccagcaatgatgcaaacaggccaaataaggctccagaagccccataggctgccatctgccagccgatgcctcccggagccaccgcagcccacaccataagtcccagggagccgccaaggccggaaatcacatacagtcccaagaaccgccagtggccgatcattcgttccagcactgggcccacggaatacagagcaatcatgttgaacaggatatgcaatagcgagttcggcgcatgcaggaacatcgaggtgatgagcgtccacggctcagccaccagtctgaccggagccgccatgccgaggtacatcaaccaagccctcaggcccggggcaataaatcccaacaatacctccagtagccacactgccacgcacgcaacaatcagcgcccaggtcatcaccggaccaccgcgctcccactggtatcgaatctcccgttgtgtaggaatatgcatgcagcccactgtatcgaaggtctcggatgcgttccacgcgccgcgaagatgccgagccggccaagggcagacgggcgcggatgaatcgcccacgaatgtcattccacccaatcgtcacaaacagcggcctagaatagggagcagagtcggtctgaatgggcataccgaccagacgatccctagggaaaggagccgtcatggagaacaagtcttctaacggttggaagttcttcgcgctgctgttcggcggattgctcgccgcgcttgttggcctgtacatctacaagcagcagaacccggattacgatccgtgggaggagccgtgggagaacagctcctcgccggtcgacctaggtctgaataaggccgaggatgaggccgatgacgaggcgaaagccgccccggccgaagcctgatagggcggtctttcaacgcaagaagccccgcaaccgatggatgtcggttgcggggcttcttatgctccggcggccgtcaggccagaggagcagtgtgccagatacgcggagccgttaagcgggaagcccggtgggcttcccgtaggcgacgccgagcggcgacagccgcgaggtagaaaccagcacgtagctggcgcgccgctccggcggccgtcaggccagaggagcagtgtgccagatacgttccaaatagtcttccatggagcggtcggagctgaagtagccggagttggccacgttgagcagggccttgcggttccattcgagctcatcagcgtagagggcctcgatctcggactggatgtccatgtaggcggagaagtcggccaaggtcatgaaccagtccttggtcagccagtcggccacgagcggggagtaggcgttgcggtcgccgttggagaaggtgccgtcggccaccatatcgatggcgtgcttcaggcgcgggtcggcctcgtagtaggaggcgggattgtagccctcggcgtacttcttctcgacctcgtcgacggtcatgccgaacaggaagaagttctcggcgccgacgcgctcacggatctcgacgttcgcgccatcgagcgtaccgacggtcatcgcgccgttgagggcgaacttcatgttgccggtacccgaggcctccttgccggcctgcgagatctgctcgtcgaggtcggtggcgggaatcaggtgctgggcgaggcgcacattgtagttccacgggaagtacacggccagcttgcccttgacgtccggatcgttgttgaccacgcgggagacgttgttgatgagctggatggtcatcttggccaggtagtagcccggggcggccttggcaccgaagaacacggtgcgcggggtgacgtcctcggccttgaccttgccggacttgatgtcggcgtaggtggagatgacggacaggatcttcagggactggcgcttgtactcgtgcaggcgcttaaccatggtgttgaacatggtgttcgggtcgagctcgaagccgtactcgcgcttggcgtaggcggcgaagtcgaccttgttggccttcttgacggcggcgaacttcttgacgaattcatcgtccttggccagcggctcgaggcccttgagcatctccaggtcggagagccacttgtcggtgccgaggccctcggtgatgaggtcggacaggcgcgggttggcgagcttgacgaagcgacgcggagtcacgccgttggtcacgttggtgaacttgtccgggtagacgtcggagaagttcttgagggtgacgtccttcaggagctgggagtgcaactcggccacgccgttgacgtgggagccgccgtaggtggccaagtaggccatgcgcacggcgtcgccagtgtagatggccatgtccttgatggtgttcttgtcgacgcccttggacttgagctcgtcctcgaactgcgcgttgatcttctcgatgatctcaaggtgacgcggcagcagctcgccgatcaggctggccggccagacctcaagggcctccggcagcagggtgtggcaggtgtagttgaaggtcttggtggtgatggaccacgcggtatcccagtcgtagccgtactcatcgatgaggatgcgcatgagctcggggatgccgatcaccgggtgggtgtcgttgagctggaagacgatcttgttcgggaaagtcgtcagatccggcttgtcctggcccgggtagaagacgcggatggcgtcgtgcagggaggcggagacgaagaagtactgctgctcaaggcgcagttccttgccgaccttggtggagtcttccgggtagagaatcttggagatgttctcggccttgacctgcggggtcacggcttccatgtactcggagcggttgaaggcgagcagatcgaactcgtcgtagctcttggcgctccacaggcgcagggtgttcacgcggccggacttgtagccggggaccaggtagtccaccggcacggcgcgcacggaccatgcgggctgccaggtcttggtgccgtcggcgttctcgacgaccttgccgccgaaggaaaccttctggtcgcggttgtagtcgatgtggccccacggctcttcgttggccagccagtagtccggggtttcgacctgcttgccgtccttgtcgaactcctgcttgaagatgccgtacttgtactggatgccgtagccgaaggccggcacgcccagcgaggcgagggagtcgatgaagcaggcggccagacggccgaggccgccgttgccgaggcccggctcgtattcggcgtcgacgacgtcctggaccttgaagccgagggcttccacggccttgtcgaactgctcggtcagaccggcgttgagcagcgcgttgcgcagctgcttacccatcaggaattctgcggacaggtagccgacggccttggtgttgccgttcacggtgtcggcctgggtcttgaaccaggagtcggcaaggtggttgcgcacggccttggatgcggcgacatacacgtcagcaggggtagcctgctcggtggtgacgttctgagtgtatttcagttgttcacgaatctcgtcggcgaattgttccgccgtgacaggagacttcggtgcggtgatttcggtcattctgactttccttccgggataagtgcccgtgtttattatgccgcgcgataggtatcgtcgcacaaacgtaagcatgaactctccgtaacgacgatggcggagcgttcttgcatacgttctcatttagagcgtagcacatgccccgatattccgcatcacaccgtatgccatcgtttgcattatggaagatcttccggctccggtgccatgatgggatacatggcagtaattcttgaaaaagacctgaaacgcgggcatgacgcgctggtgcaatggcgtgccgcggcccgggagctggcggacaacacaccacatcgtctgaccgtctcccctgtcttgccacgcccggtgtgggcgatggccgtgcgctactcgctgtttctgctggagcggcgcgcacccggccctggcgtggaggtgcgtgtcgcgccgtggggggcggtcaaaatcttggacggcccggaatcggacccgcataacctgaccccgccggacgtcatcgagctggacccggaagtctggctgcggctggcctgcggcatcaccacatgggcagaggaaaaggacgccggccacatcagcgcggtcggcgagcgcgacgacctgagcgacctgctgccgctgtgaggcgcgaagcgtaagtaagccaccagcggcggcaccatcagccataaccacaaatccccttgtgctcaaccaagcacaaggggattattacgagaagaccggcgttcagctcttcttgggcttgagcgcggaaggcatgggcatcggaatcggcttgcgcggggccggcttcggtgcggcaggcgcggaggccgggaactcgccgctggtcgcctttgcggcggcttcggcagcccacttggcgtactcgtcgaggtcatcctcctgcgtagcgggagctgcctcggcggcaccggaagcgtggtcatcagcagcggaatccacatccttgtccgcatactggtcatcgatgtcggcgaacgggtcaggagagcccattcccggctcctgctcgctcagctcttttgccagctcatcgtagtcggtatcggtggtcaggtacttgagctttcgggcaattttctgctgttttgctttttgacgtccgcggcccatctgaccccctgcgattactgtgctgttcgattcatcaacaatagagagtaccactaatagtggcttgttcgttgtcggctcacacttttaccataaaaagcgtttatttagggcatattcaaaggattttcgcatgaccgacgagcagcaactgacagcggcaggcaatgagatgagcgcgagcttcctcgcggccaaaaagcgttcggacgaaacgctcgccaagctggaggccaagccgtcgtccttcaccatgttgaccggcgaccgcccgaccggccggctgcacctcggccactacttcggctcgatccgtgagcgtgtcgccatgcaggagcgcggcgtcaacacgaacatcatcatcgccgactaccaggtgatcaccgaccgcgacaccaccgagcacatccaagacaacgtgctgaacctggttctcgactacatggccgccggcatcgatccgaacaagaccatgatgttcacccactccgccgtgccggccgagaaccagctactgctgccgttcctgtccttggtcaccgaggccgagctgcaccgcaacccgaccgtgaagtccgagatggaggcgtccggccacgcgctgaccggtctgctgctcacctacccggtgcatcaggcgtgcgacatcctcttctgcaaggccaatgtcgtgccgatcggcaaggacaacctgccgcacgtggaaatcacgcgcaccatcgcccgccgtttcaacgagcgttacgccaagaagaacccggtgttcccggagccggccgccattctgtctgaggcaccggagattccgggtctcgacggccgcaagatgagcaagtcgtacggcaactccatcatgctgggcgccaccgccgaggaaaccgccaagctcatcaagaagagcccgaccgattccgagcgccgcatcaccttcgacccggttgcccgcccgcaggtctccgccctgctgaccaccgccggcctggtgaccggccgcgacccgaaggacatcgccgaggagatcggtgattccggcgccggcgcgctcaaggcatacgtcatcgaatcagtcaacgagttcctggccccgcaccgcgagcgccgcgccgagctggccaaggacatggattccattcgtgacatcctgcacgacggcaacaagcgcgccaacgccatcgccgaggagaccctcgaccaggtgcgcgaggccatgggcatgaagtactgattttcccgccgctcgtagcaagacgccgtgtcagccccaactgggcaactgacacggcgtttttgtattgcggcgtctgctgtgtcctatcttcacttcgaggggcggatttcttgtttttccgtgcaacgcggctatcaagacggacctctgttcacttcatgccgatggcttgcatcaatacgtacgctccccgcacagcaatgtcattacgacgtgttgcggcatagcgcgcatggcttccggagtatcggcggcgtatgggtcggcgtccagcaacaccacatcggccgggtcgccggatgcaaggcggtcacggccagtggcggtcgaggctgccagcgaggtatgcacatcgaggcactgctcgggctggaacggctcgcggtcagagctttcggtgccgagcacggcggcggaaatggccagccacgggtccagcggggccacgggcgcatccgagcccatgcgcagcgtggtaccggcgtcgtggagggccctgaacggataagggatgccggccgggttggcccagaaacgggtgatgacgtcgcggtcatccatggcgtgctgcggctggatgctggccgtgagccccagctcggcgaaacgcgggatatcgacgggtttgagcatctgcgcatgctcgatcgatccatgtgcgtgcgtggcggcgactgcgttgagcgcaatggtgttcgcttcgtcgccaatggcgtggcaggcaatgtcgaagccatgctcggtggctaggcgcatatagtcttcgatttgctgcggcgtgtagctcagcgtgccatacgtcagcggctcgatgcccgaatacggcgtggagcagtaggcggagcgggtgttgagcgatccgtccgagatgagcttcatggcgcccacatggccaagcccggcgctgcccggcaattccttgccggtatgccaacccgcgtcaatggcggctcgcaaccgctcggggtatacaccggcgtccacgcgcaaaccgttaatgccagccgcgaaacgattgatccatgtatcgatgttttcggccatttcataatcgcggatgcccaccacgcccttgcttgcggcgtcctgttcggcctcgcgcagcagacggtcagtctcttcagcagcgcccggcgccttgtcgaaggcggtgtaggcgttgaaccattcgagttcaccgaccagaccggattcgtccacatgtacgccaagcctgcgggccgcggcggaattcacccatccgcagtgcatgtccgcgctggagagggccaccggctgttcgccggtcacggcgtcaattgcggccagtgtgggctgctcgtcgtcggcccacagcgagtgacggaatcgcatgcccaccacgaaggcatctgggtcaagcgtgccggcggcgcggcgctcatccagatgacggcgcaacatgtccatcgcttcggcggcggaacgggcattgatgaggtccagtcggcccagcgtcttagcccattgcgtgaagtgcgtgtggcagtcccacaggccgggaataacccacaggccgtcggcgtcgatggtggtttcgtcagcaggtgcggaggccgacgttgggattgagacgccgccagaagcaatggcattcgtcgcgtatgccaacgatgtcgtatgcgccttagtctgcatcgtgccgtccgaagccgagaccgttccagcagggccgacagacgcaacaaccccatcgcgaagcaccacatccacgcggtcctgagaccccggaacaccggcattgacaatacgcaccaagctactcatacccgccatcatgccacctttgcatgaacgccatggagattcgttcaagctgaatcgcgccgtcggcggcgattcccgctggctgcctgcaaacccctacgttccatgtaattgcgggatggcctgcaactgcgatgaacacccatagtttatccaccgacttatccacatttatccaccgaaaaattggggcggtagacaaggccggtagccggactctacactgcgaggacaaagcgaacatcacgaaggggtgatcatcatgggtagctcaacggcattgaccgagctgacaatgcagaagtaccaacgaatgcagacgtgcgcagatgttcaacgacgaagcgcatggcgcccaccctatgccctgacaacagcgttggagcttttgtcaattgaagtaccccgcatatcaagcaaacacagaggccttgcaactacaaccattgttgcggttccacacgccaatgacaaacggcacattgtgggggtcaaagtggttgtatggccttttccactagacacggtcataatcgagggacaattcacatgcacttcaccagcttgcacatgggccatgttctccacgtatctcgaacttgaagaactcatcgttctcgctgattccatgatgcgacgagatcgaaggctctgcagaacaaccatcgacgccctttctctgtatctcgatgaggccgaggcccaggtgcgagccgacaaagagaatggcaccaattcgtatttgttccgcgggtataacaaatgccgtcgcgccctacttttggcgcgcgcgggcacagattcctccatggaaacacgaactcgtttggttctcttgaaatacggtctgaattgcccgcaggtgaattatccaatattcgtaggaaacaacaccagacccatatatctcgatcttgcataccctgaattcaagatatgtatcgaatacgaaggctctcatcatgccgggcaatggctgaatgacgcgagacgccgccagatgatcgaagatgctggctggaagtacattcaagtcaccaaattagatattggcgacgaagcgggagaagaggcccttgcccgaagagttgccgaaaggatacaggaggttacgggcaaaacggtccagctcacgatgcggcaaactacccagcaaattagcgatgtccgaaagctacgccgtattccactgtacaaacggctgaaattcgagcctctgctgccaattattccgacggcgcaggaataataagcccggtagagtcagtccgcaccgtccgcaccgcgctacggtattcaaaacccatttcaaggggctgatttggcctccgccggaggtctacttccgtttcaaggggctgatcatccggtagaccacgtgtatcaatgcccttacgtcaacgccattccgccgttttggagccgcgtctactcaggcatcagccccttgaaacggaagtagatctctccagaacgtcaaatcagcccctcgaagtccgttttggcctcaatggttcctgccgaaccacaaaaaagccactcctctgccatacgagccgaccgcacagcaggcacgtgtcatttgccgctgcggacctcggactccatggcttccatgggctcgtcgacgagcacggtgccggacggcagggtgccgggcagcggatcgtccatgtagtggtcgaattcgtagagcatgcgcttgttcggcttggcggtcagcaacgaaaccaccacgatgaacagcagcgaaatgatgaacgccggcagcagctcatagatggcgaatacgccgcccaagggcttgacgaggttgtgccagagcagcacggccgccgtgccggacagcatgccggccacggcgccggccttgttggcgcgacgccagtatagcgagcacagcatcaacgggccgaatgaggcaccaagcccggcccacgcgtaagacaccacctggaagatcgacgagttctggtcgtatgccaccagaatgccgaacaggaacatgaccaccagcgtgaccctggccacaatcatgacctgcttgtcggtggccttgcggtgcagcagcccgcggaagatgttctcgcccatggccgaagcgccgatgatcagatacgaggagctggagctcatcgaggccgcgaaaatgccggagaccaccacgccgcacatgaagctcggcagcagggtctgcgccagcacgatgaagatggtttccgcatcggtggaggtcagcagttcggtgggcatcatcgcacgccccaccaagccgatgcacactgcgcaacccagcgaaatcacgcaccaggaggtggcgatgattcgggacttgcgcacttcttccacgctgcggatggacaggaagcgcaccagcacctgcggcataccgaagtaacccaggccccacgccagcatggagatgatggtgatgatgccgtagtcggagggcgcgccgaacacggctttgcccgcctcgacgagctgctggccggtggccgggtccagcttgggcgcggccacctgcgtgccggacaggtagccggggatggcacgcaggaattccacggtgttgtcgatgccgcccgcgctggccacggtgccgatgaacaccaccgcgagcgcgaagaacatgagcatgccttgaatgaagtcggtcatcaccacggacaagtagccgcccaccacggtgtagacgaacacgaccaccgcgccgatgatcatcatgacgtggtagtcgaaaccgaacaacgtggcgaacagcttgcccacggtcacgaagcagctgcccacgtacacgctgaagaacaccaggatgatcacggccgcgatggtggagaccacgcccttcttgtcatggaaacgcttggcgaagaagtcaggaatggtgatggcatcgccggccactaccgagtagcggcgcagtcgccgggccacaagcttccagttgagataggtgccgagcgccaggccgatggcggtccacatcgggtcggccgcgccggtgaagtaggccaggcccggcaggcccatcagcagccagccgctcatgtcggaggcttcggcgctcagggccgtgagccacggccccacgccgcgcccgcccgcaaagtattccttggaggaggagttggagcgtttggagtagatgaatccgatggacagcatggccgcaaaatagatgaccatggccagcagaatccagaaatcgttggccaactgcgacacctccccaatcatgacgccaagcggctaccgccatggcagaactatgtgctgatatgcgtgctgatatgcgattgacgccggagcggcgtcatacagaccgtcacagccgtgaatacggccgcaacgcacttcgcctgatggtagtgaatacaagggctcaagcaccttccaccgtttccatactgagacgctgttttatccgagctcccctcacctgaggggagccaagatgacggtcagatgtcgtagcgccaggacttgtcggtcaccacgcgggccatcgccaaaccgatcggcagacagataatcaccatgaacgcacggaacgcccagtccagcgcattcatggtctggaagctgccgaggtaccacatggcacggtacatatacagaccgggcaccatgatcacgatcgacggcacggtcaggcagatgcgcgggtagccgaggtgcggcggtagccagccacgtcgcacggatgaacgccacgccgatgccagaatgcccgccaggaacgcgccgatgaaggtagccatctcgggtgccacgttgaagtcttgcaattccaagcgcagcgtgtccgtgatcgcaccgatcagggcggcggtcaggcacatgcgctgcggcgaattgaacagcacggagaagccccacacgccgacgaacgccgccacgaatcgcagcaatccgttgacccacgggtcaagccccagtggctcaaagccttccgggtgcaggtgcaccatcacggccacggcccagcctgccagcgtggccatcaggatgatgcacagcacgtacgccacgcgctggatgcccgaggggaagtcgattttcgccatgtcgagtccgcctgtgatgagcgggaaaccggggatcacgaacagcatggcgccaatgtaggccgtatcgtgcgagagcgcgactgggtcgaaaatgccgatgagtcgcagggtgccggtgcaggcgagcgccgccgcggccacgcacacaaaggtgacgaagaactggttcagatggtatgcaaacagccggcgacgcatccactggccaaggcccgcgcccacgaacgcaccgatcatgtcgtatgggccaccgccgagcaggaacacgaaggccgcgcaggccagggcggaggccagaccggagaaccacggcttgtacagcggcttgcggcgctcaatcagatcgagtcgctcgtgcgcctgccgcacggtgataccgcccttggccttctcttcgtcggagcgctcgttgaagtgttcggcgtattccttgggcacgcgattcttgcgcttcgtactgcttgcagcagggctttcggcggttgcgccgttcgccgccgcgccctcagcgcccgcctcggcattcgccgcgttcgccgattcaaccgactcattggagtcaccggtaaacacttcggcatcgtcgtaggccttctcttcggccgctttgtcttcgaccggagtgacttccgcgctgtccgccaaaagtcggtgggcttcttcattgtcatcgtccaaggacttggccacggaggtcacgagtaccttggttttcgacgcaagatccagcgcctcgtccacgctgccgttggccgcctcagcctcgaccttggcacgttcgcgcaggcgcttggccagatcggccgaatactgcgaagcgtcacgttcgtccaaatgcttgaccacgccatcggacagttgcgaatcgacgtgatacatcgaccccttgccgagattcacggagaaccagtcggcgaaatgttccagcagccagatacgttcggtgttcacgccggtactcggcaaatccacgacttcggtgatgcggttacgaccatccgtgcaggtggcctcgatatccgtcaggttcacgtcggcgcgtacgtgcacgcccagcgggtaggcgatgcggtgcatcatttcacgcacgcggaaggagccggtgccggctcccaggtccaacatgccgactcgtacaatcacgctggctttggcggcgataccggcgtccaccaccggtttttcccaatcgcgtgcaatatcttccatgtccagcggaatggagtgggtgtggaatttacgtacagccgttgcgcctttcgcttcgggcgcactttttttcttctgttcgctcacatccttcattactactccctgccttccccgccagcaatcgtaaggcgctcaaatcttccgcgaatcggacagtgtctcatatgctgtccgatattcggtctctataggtggacaacttggcgcactatatggacttcgtaacgtaaaaagcgatttcgcggggatacactattgcccacacaacaaccacgttgaatatgggctgtgggctcgcaacgactggtctcaacaactgcggaggagccgcagacgaccagtagaccgagcaacctgttattcggcaaaggaggttatatggcaacacctgaagaacagatcactcccgctgacgccgccatcgtcactaccgggaccggccgaaagggcccggaggagcatgatcttcccgaaagcctgaagtacgacatggatctgtgtcttgagatcctgcgtaacgtactgggcgaatacaaccccgaactgctgtctacgttcgacaccgtgcgtcattacgcggtggaggccagcgccgagcatttcgccgagctgaaggatccgaaccccgaccaggatggcctgaaggaggccgtgaacgtcatcgacaacatgacgttgcacgacgcccagctgctggcccgcgcgttcgccacgtatttccatctggcaaacctgtccgaggagaactaccgcgtttccgtgctccacgagcgcgagaacaacgtgcccgttgaccaggcggtcgatccgatcaacgagctcaccgtcgcctaccaccagctcatcaatgagactggcccggccaaggccaaggaactgctcaaccagctcgaattccaccccgtcttcacggcgcaccccactgaggcccgtcgtaaggccgtggaaggcaagatccgccgcgtttccgaattgcttgaggagtacaagcgcctcggcggctcggataagaaggaatgcctgcgccgtctctacaacgagatcgacgccctgttccgcacctctccgatcgcgctgaagaagccgaccccggttgaggaagcggacacgattctcgacatcttcgacaacacgctgttcaacaccatccccaaggtctaccgtcgcttcgatgactgggtcctgggcgataaggccggtctcgtcgagcccgcttgccccgcgttcttccacccgggcagctggatcggctccgaccgcgacggtaacccgaacgtcaccgccaaggtgagccgcgccgtggcccgcaagttctccgatcacgtaatcgccgcccttgaggaagccacccgcaccgtgggccgcaacctcacgatggaagccgagaccacgccgccgagcgccgagctcaagagcctctggagccaccagaaggaaatgagcgagcgtctgaccgacaaggccgccctgatctccaccaaggagatgcaccgcgcggtcatgctggtgatggccgaccgtctgcactacaccatcgagcgcgacgccgacctcatgtaccactcctgcgacgacttcctcgccgacctcaaggtggtccagcgttcgctggccgccgccggtgccaagcgttccgcttacggcccgctgcaggatctgatctggcagaccgagaccttcggcttccacatggtggagatggagttccgtcagcactccgtggtgcatgcccgcgcccttgcggatatccgcgagcacggtctgcacggcgagcgcggcgaactgcagccgatgacgcacgaggtgctcgacaccttccgcgctctcggtgccatccagaagcgcaacggcctcaaggccgcccgccgctacatcatctccttcaccaagagcgcccagaacatcaaggatgtctacgagctcaaccgcttggcattctcccacccggaggacgtgcccaccatcgacgtgatcccgctgttcgagcagcttgaggatctgcagaactcggtggacgtgctcgaggaaatgatcaagatccccgaggtccaggctcgtctgaaggccaccggcaacaagctcgaggtcatgctcggctactccgactcctcgaaggacgccggcccgacctccgccacgctggccctgcactccgctcaggagcgcatcgccaagtgggctgagtcgcacgacatcgacctgaccctgttccatggccgcggcggcgccgtcggtcgtggcggcggccccgccaaccgcgcggtgctcgcccagccggtcggttccgtcaagtgccgcttcaagctcaccgagcagggcgaggtcatcttcgcccgctacggcaacccggtgctggccatccgccacgtcgagtccgtggctgcggcgaccttgctgcagtccgcgccgagcgtggagaagcgcaacaccgagatgaccgagaagtacgccgatatggccgctcagctcgacgaggccgcgcacaaccgcttcctcgacctgttgaacaccgatggcttcgccccgtggttctcgatcgtcacgccgctgaccgaaatcggcctgctgccgatcggctcccgcccggccaagcgtggcctcggcgccaagtcgctcgacgacctgcgtacgattccgtggatcttctcctgggctcaggcccgcatcaacctggccgcctggtacggtctcggcaccgcatgcgagaagttcggcgatctggagaccatgcgcaaggcgtatgaggaatggccgctgttctccaccttcatcgacaacatcgagatgtccatcgccaagacggacgagcgcatcgccaagatgtacctcgccctcggcgaccgcgaggacctcaacaagaaggtactcgaggagatggagctcacccgcaagtgggttctggccatcgtgggcgacaagtggccgctgcagcaccgtcacgtgctcggccaggccatccgcatccgctccccatacgtggacgcactgtccgtcactcaggtgctggcgctcaagtcgctgcgcaagaaggtggacaaggaagagctctcgcaaagccagcaggccggattcatctatctgatcctctgcaccgtttcaggtgttgctgccggcctgcagaacacgggctgattcccggccgaccgatcgacaaaagcgagcggggaggttccgtgccgataaacggcgcgggcctccccgctcgcgtcatccggccctagactggccggcgacggcgcacgccgggcgggcgcgcagagaacggacgcgcggaacgggcacctcgacagatcggaggggacatgggcaagccagcgggcgggcgcgggaacaccgggtccacggacggcatcaaggcggggggcgacgccgggaacgaacgccacacttgcaaagcgaatccggctacaaccgatggcattgggaagaaacacggcacagaagatacgtcagaaaatttttccggcgagagatgtgctttggcaccgaaagcagctaccaaattccctaaggcgagtagatgctatgtggctttgggcaaggccaggcgtgcgctatggtggctgggattactgctgctttcaccagcacttattttgtgggcggaatggggcgccaatggcgatgatgatactataatctgcagagtcttaacgttctcttcctcttcgtgcatgaatttaactacggcaactgagtatgtacgtagacttaccttagtattgattatgggggtagtctgctggattgcggcgcttgtcatctttggcgtgcgttcatatatgcgatctgtatatccggaacttcgtgatcattcctcttccgcctcgcatgtccttgtgggaatcatatcgtttctcgtgctggtcatggtctttcccgttcttgtgataacactactttccgctctaatgactctatgacgttttaccagaggcgcattgcgtggaatggctgaatcattccacgcaatgcgatcacaatcatgattgattaacggttcggatttttcaagagattcagcataggataatgctaatataccagcctccgcttgactcgggagtcggtctgcatgtgacgcaatgagcagtgcttttttacttccggatacgttatcgaatattccaagatcgattccatcaacgagctttcgaaatgcgatgaccaggttgtccgcacttcccttgaaccgagactgatagaaccgtttaattcgattcgtctcgctttgcgcgaacatgtcccgcatagcggtggacaatgacctttcggaggaattgctctgcatggaccgcgccagcaaccatgcatcacagtccgcgagaacatcgctgtaactgaatcccatacgagcgtcttgctcgccgagatgagcgtgcagccatgacgccaggtcctcttccggggcattcgccaggtagcttccccaaatctgcagcaaatccagggcccatccgcccagatcaccgagaccatagtccattggatcgttcgtaacgccccatgtcaagtatcccaaggatgtggcggccatatgggcgatgtcccgattgggcagcgtgcctttgatgacaggctgtgcatcacatgcgacaccgcatgcctgacgcgacaaggccaattcgctgggagtaaccggcttcggggtgtacgcgtgccatagtgcctgcgtgccggaacttccttccgaccagtactcaggtttgcgaagccactgcaggatgagttgaccgatgctgtcctcataaaccgccacctgggtacccagagcggcaggggctttgtgacactcctgctcgggtgtcgccgccggtctgcagaacacgggctgatccgcggctgaccgaccgcttgacgagcaggaaagttccgtgccgataagcggcgcgggcctccccgttcgcgtcgcacggccctagactggccggcgacggcgcgcacggaacgggcgcgcgggccgagtgacagactcggatgatcgaaaggggacatatgaatgaggagaaggacacggacgggacgacggacgcgcacgagggggaccacacgcccgcggacggtgccgggacggagggcgaaggcggcaagccggacactaggccgggcgacagactcgcgaccatccgacgcacgctgtggtggataggactggcgctacagctcccattcgctttgactctgatccattttgataccccttacctgatattggagcgtatcctatgcgctattccgccaagactggcaagcgacccgtcatcaatcgtcggcattcccgcacttgaaacggaatggtgtcgagaattcctggcactagtcctgagcgcagtttgctgggttacagctggagtaatgagattagttgcggacagcccatcaaaccatggaaaagaaacccttcctgtacgcatcttcgccggaatcatcaccatcatcgtattgatggccaccggtattacaggactcttcctcggcatagcggccttttagaagtttccccgtatctggcagaggaattccaaatcgaaagcacaacagcgaatgtgtgggcagacgacacatctgcccacacataatgcattatgcgagctaccgtcttggctgatcaatgaatgcagcgaacgcccgagcactcacttcagcttcctgcttatcaggaagcttgtctgtaccggcagccttttttaggatgctttcgctcattccaatatttgtcaaaccaagtgcatcaagaccgtccgccattgttgaatatgcactcaccacattatctgcgcttgatgcaaaacgttcgtcgtagaatcgaacgatacgatgggtctcactctgcttaagaaaaattgaagcaaaacacgcaaagccagcaggcaggattcatctacctcatcctgtgcaccgtctccggcgttgctgccggcctgcagaacacaggctgatctacacaccagcgcatatggggaagccccgctcgatgtgagcggggcttccccgttttgtgtacatctttcaccatcttgcaataattcttacatgtaaacagagagttcttacatgaaagaattattgaaaggtgatgaaagaacttactttcacgcgcgccaatcatcccaacacgtatcgggatgacggcccattcccctcgcggcgcaacttgcccgcatcctctagcttcttcaacaaccggtatgcactgatatagctcaggccaaacaaatccatgacatccgccgtagtgacgacaccatcatttttttcggcgaactccagaacaaggccactgcgccgggtggcatcgatgtcacgctggcgcacgtaagacgccagcccctctgaacgtttgtacactcgggcactcagcatatacgaacgagagctcccgctaccgaccccctctaccaaaccagcttccaccagattctcaacagcggacacgatgcgtcgatgctccaaatgggagaaatcgcacaattggaccacggtaagcctacgatgctcacgcagcagcgagagcacaatcagtgaccagaccggcaatggagccccacgtcgacgttcctcgtcgccaatcatggttacgaatgcctcgtcaggtaccacacggcgcaagaacaagataacttcctcagcactggactgtgaataatccgggaaagaaccacccgccgcaatcgacccggcatagatggtatccacgcctcgtccggtgcgttcaacatatccggcagctttcagaatcagggcaagctgcggattgcgggaacgcggttgtgcagtaagcaggttatcttcggaaacaccctctatgaatcctccggggttggctatggtcaacccatcatcatcaaccaggaatctcaccgaacccattcgtgcataatcgcgatggcagaaagcgttaatcattgcctcacggaatgcccctcgatcgaagtctggcagatcgacccgaatcaagccgctcatgacttcgtggctgggattccatggctccatcagctcgcctacacgatcaaacatatccaccaaaggcaacacgaacggatccatattgacctttggagacatgcctttcatcacttgaaaaacagccgatgcggctggaaccgatcgatgaatagcatcaaccgaaccaatggtgagcagaccagcaacagatggctgcaatccatacgggccatcaacaaccagctcaagtgcccgatcgaaatcctcatcagtaaaagacaacaacgagttttgcgcattggcactgcgaatacggcttctcaacttgttccgtgagtctggattcaaatcgtccaaccgagcctctggtgcaggttgcgcgctgaaatcgtagaaccgttgctgagataaacggctaatgaattgggaaacaaacagcggaacgacctcaggcgagccgtctgctttcagccggcgctgcaatgtcttcccctgactggtagatacgatttgctgactgttatccacctcaatactgactatcggcacctcgttctcatacaagagcgccacgcgagcgggaagctgcggaacagtcttattgaaaattagtaccgcaagtccattgatattgcgatgctcgtcacatacgccggtcacagtgccatcgtcttcaataccgagatacagtgtgccgccttcggtattggctagagccactacggtgtcaacaatttcatcatgcgattgagggcgcttctgctcgctcttgaactcaaccgtcaaactttctttggccggcaacatgagcatcccctttcaccatcttgcaataattcttacatgttaacagagagttcttacatgtaagaattattgcaagatggtgaaaggggtaaagagcaatccatcctgtcatctccagcaacttaaatccgatcatcgctgctttcggcatatctgatatcagccgctggtgccagtccaattacccaattgaagctcaacacggccaaagactctacgccgcagtggattcgcgctcgatgagcttatggcccacgttcacggtctgcgggaagaattcatcgtccgggttctcgatacgccgcataagcaaggtcagcgcggtatccgccatgcccttgaaatccgtggccacggtggtcagcattggcacgctgtacgcaccctggctcaggccgtcgaagccgataacgcgcacatcgcccggcacgctcacgccatcatccgccagaccacgcagaataccgagcgcaataccgtcgttcaggcagtacagaccgtcgtacttgcacttgcctttcttagccaagccgcgcccggcctcgataccgccgtcaatcgaccacgaggatttgatgtaatcgcggcgctcgtcaaacggcagtccggccgcgagaatcgtctccttggcggcccgcatacgaatatcacgcgagccgggaatgatgttgggattgttgggatcgtgattgtcgccgacgatgccgatgcgcgcacagccacgcgcgataaggtgttcgattgccgcccgtgagccggcgtcgctcggcgcgttcacggtgtcgacgggcaggctggtgtcgtagttttccagcatgacggccgggtgccgcttcaggatatcgaccgcacgtggcgcattgatggcgatgatgccgtccgaaaacgtgtacgacagatcgttgtcgtcggtaagataccgggacagttcgatgagcatgtgcgagccgcgcttgtgcacttcctcagccacacacatggccagatgggagaaatagtcgccctcgaggcccgaggtaaggaaggtgatggtatcggaccgcccagaacgcagggaccggccagacaggttgattttgtagccgagtttgcgggcggcgtcacgcacgcgctgcgtggtttcgggcttgacgtaatccttgcctcgcagggccgcggaggcggtggtggcggtcactccggccagttcgccgacatcctttaaggtcaccatcgttaccatctccgcatatcacgaaccttatcgataagaatccatagtaccgcccacatctcagccgaggatgagaccctcggtcgaggccctgcccggcgactcgaacgccgcggtcaccgtggtgagcaccgacgctgcaaacgaaaacatgtcaaaccaagaaatggacatgacggagtcattgttttccgagagggatatgccgcgtccacgggcagacgtcacgtatcaatcacgccgataccgtcatataactgttttcgatgtgagaaagctcatagcttccgaccacagaaatcagccacagcaaccccataacagcgttatagttctgtttgtcggcgtcgacaagagccagcagcgccgatgaaatgcacaccaaggatgtttagcgaattgttcgcagttcgcacgattcgatttgattcgattcgtgcagcccggatggttcacgggggcatgccgtcgtgatgtgcgtggatatgggcgatacgactctcgttcgggccggcaggccatcgtacaccagttacgaaaggatccgcccatatatggcaaggtttaccgagaatcgttggaccagcgcgattatccctgcactgctgattcatatcccaatcggtaccgtctattgctggagcgtgttcaagcagcttatcgctgaccgtctccacgccagccccgcctccgtggaatggggcttctcactcgccatcttcttcctcggcatgtccgccgcgtttgccgggccaatggtggagaaaaacatcaagaaatccgcactcgtctccatggtctgcttcgtggtcggcttcgccggcacgggcgtgagcatcgccctgaacttcctgccgggcgtgttcatctgttatggcgcgatcatgggcatcggcctgggcgtcggttatctgactccggtcaagaacctgatgctttggttcgccgacaacaagggcctcgccaccggcatcgccgtcgccggcttcggcctggccaaggccattgccagcccactgatggaatatctcatcggcacggttggcctggtcagcatgttcttcatcctcgccgcggtctacgcggtgatgatgttcgtcggcttcctgctcatcaagcgtccggccggctgggtgtacgatcccgcgacctcacacgtcagccgcaagacaatcctcaagaagcccgtgttctggggcatctggatagccttctatatcaacatcacctgcggcctggccctcatcagccaagagaaggacatcctgcacgatgtgctcaggaccttcccgcagtatgccaacctgagccccgccaagtttgccgccgccatctccggcatcatcggactggtgctcgccgtggactccgtgttcaacacggctggccgcgtgggcttctccacactctccgaccacctgaagcgccgcgagaccgtctatcaggtaatcttcatcatgtcgattgccgtgtgcttgctgcagatcttcaccaacagcatcggcaacgctctgctgtgggccgtgctggccatgctgttcctcgtcaacgcgggctatggtggcggtttctcgacgctgcccgtgctgcttgatcagcacttcggcaccaaaaccgtctccaccacgcacggtctgacgctgagcgcctgggcgttcgccggtctgtccggcaaccagttggcctcgttcgtagttgcccacgcgcctgatcaggcccaccgctacgccgcactcatcccggtgctcaccggcctgttcgttgtggccctgatcagcatcagcttggtcaagtacctcggcgacagaaacgtcacgaaggccgtcgaagaccgaggctgagctgccgcaaaacaacgattctgccggagtcgggcgcatcgatcgcatcaatcgatgtacgtcacgattttggcagaatcgttgttgttgctgttgagtacctgaggtcgtgcggcttacgcgccgaccagttcgagcatttgggggatgctctttttgccgaattcgacttgctgggtgccgtcggcgtgggtgatgacgatgcagggcacgctcatcgcgccgtactggtccttaagttcggggaagtgcgagacgtcgtaggcttcggcgcgcacggccgggctcagggaggcaatgcgctgggaagcaagcacggtttccgggcacatcgtgcaggtgagcgagacgaggatcatgatgttcagcgggtccgtgatggacttcgcgcgttcgaccaggtcatcgcccagcggctggccgggaccggccgcgttgtacaggccaagcacgaacgagttgaactcgtggccggaaggtacgccgtggaaggccagaccggtgaagaccagtgaaccattgccgtccttgccggccttgccgtcgccctcagccggcacgcagatgcgcacggtcgggcgggcgagcggcaggacgccggcgacgtcgaatgtggcgcggccggaatcgtccaacgaaccataagtgggcagttcggtgccgtccggcaaggtgacggacagcggttcgccgaccaccaaagaagtaggcacagaagcaccatccaccgccgtgatcagccctgcggcatcaacgacaaccgagttcagcttgccgccggacagcgcaaccatctcgccgatgaaaccctgcaattccgccgaaagcggagtgccgtccagttcgagagcgagcgtgaccgggcgggtcatgcgtccgaagaccacgccaagctgctgcttgacggcggcggagaacagttcgccgggcttcttggcggcgctggctgcggctgcggcatcggcgctgcgtttggcgggagccggggcgggcgtcgtgtcagcggccgaggcggcggaggcggccttggcctcggactcctcataagcggaagcagtgggacgcggcggcaccaagccggttttctcgctcatctgcttggcgtatcgctccagttccacggcggcaatcgcaccgtcggaggtggcggtgaccacttggcgcaggttcttgacgcgcagatcgccggccgcgtacacgcccggcaccgaggttctgaggtagtcgtgcgtgaccacgtaaccgtggtcgtcgagctccaccacgccgcgcaccaaatcggtggcgggcacatagccggcgaacacgaagacgccgaaggtgccggcgtcggcgggcttccacgtttcggtctggccggtggcaaggttcaggattgaggcttctcgcaggcctccttggccggcggtgacgcccttcagctcgacctgataacgcacgtcgatcttcgggttgttcttggcttcggcggccactgcggcatcgcaggtgaagtccggttcgcgcacgagcacggtgactttggaggcgtatttggtcaggaacacggattcctcggctgcggcgaatccgccgccgaccaccagtacttccttgccggtgaagaactcgccgtcgcaggtggcgcagtaggccacgccgcggccggcgtactcggcctcgccctcgaagcccagcttgcgcgggctggcgccggtggcgatgaggatgccgaacgtcttgaggtcgccgcgtgaggtgtgcacggttttgatgtcaccatccacgtcgagaccggtggcttcggcggagaggaattcggcaccgaagtcctgagcctgctggcgcatggtctgggtgagtgcgcggcccgtggtgcggcccacgcccggatagttgacgacttcgttggtgatggtgatctggccgccgaaatcgtccttttcgagaatcagcacgcggtagcgagcgcgggccaggtacaggccggccgtcaggccagccggcccgccaccaatgacgacgacgtcatagagattgttggtctgagtcatgaaaactcccttacatacactggctcccctctctgaggggagctgtcgtagtgagactgagggaagcatatcggatcaggctagctctcgcgagcactccccccagtcgctttcagcgacagctcccctcagaaaggggagccaagattaccgcctattcagtgtcgatcacagctggccgacgaggtcgaggctgggctcgatggtttcctcgccaggggtccagttggcggggcagacctggtcgccgtgctcgtggacgaactgggaggcctgcacgcggcgcagcagctcttcggcgttgcggcccacgttggaggagatgacctcgtaggccacgaccttgccctccgggctcacgatgaagtcgccacgctcagccacgccatcggcctcgttgtaggtgtcgaggtccttggccagcagggcggtcgggtcggcaagcatcgggtactcgatcttggcgatcttctcgttggcgtcgtgccaagccttgtgcacgaagtgggtgtcgcaggagacggagtagatctcgcaaccgatttccttgaacttggcgtagttcttggccaggtcttcaagttcggtggggcacacgaaggtgaagtcggccgggtagaagaagaacagggaccagtggccgagcacatcgtccttggtcacttcgtggaactcgttgttctggaatgcgttcaccttgaaatcggtcagttcatgctgcagaagagtcatcatcggtcctttcgggaattgttaatcttcaagcgtttaccgccacctatcgtaatgtggtgagccacggctcgcgcgggtgtaacgtatgagccttatcacaccacccgcaacccttgtgcccaaatggccgttgccccaatcacgactatgcgcgaatactcgctaatatggcaatcagcagtccgctgataatggaggtttcatggctcagtcagactttgaacaggaatcgaccgcgaacgcaacgtggagctgcatgctgcaaggcaaccggcgctttgccgagggcaagcccgaccacccatggcaggacaaggagacccgccagacgctgcttgatggccagaacccggatgccgcggtgctctcctgctcggactcgcgcgtacctccggaaatcatttttgatcagggcctgggcgacctgttcaccgtgcgcaccgccgggcaactcatcgatagcgcggttatcgcctcgctggagtacgcggtcaagaaactgcacgtcagcctgatctgtgtgctcggtcacgagcactgcggcgcaatcgaggccgccgagcaggagctggacgacctgatgcacaccatcacttccgaagccgacggctcactggaggccgcggatgcgatggacgacctcgacgagcacatcgccgccgccgaatcgattattctgcgccaggccggcatgtccgtctggcaggcgcgcgaagccgagctcgacgcgcatgaagacatcgagcgcgtgcatgtggcccacattattgaaactttggtggagcagtctcctgtcatccagcaggccctcgccgctgacaagctcatgatcgtcggcgcccgctatcagctcgattccggcaaagtagaagtgctgagcttctgagcgtgcgatccgcaacatcgccaacctgcgtgggatttggcgaatccttggccatagccgcgagaaacagcctctctgcactagtaatgccgtccagcgctggagcgcatacggcatcgtcgaaggcgagcaacgcatcggaaacaccggtcgacacgtcggccgcagtaatgataagagtgcccttccctttgccgagtttcttactgcccagccagcacaccccaatttgacgtgccgctcccctagagttgaagccatgtcacttggtttgaacatcctcctgatttttgtatttctcgttatcggttccgtgttctccggcaccgagttggcattggtctctctgcgcggctcgcagatcgagcaaatggagcaggaggacgctcgcggcgccaaagtcgccaaaatcgcacgtgacccgaacaccttcctctccaccgtgcaaatcggcgtgacgctctccggcttcctgtccgcctcgttcggtgcctcctccatcgccccctacctgattccggtggtcgaaagctggggcgtgcaccccggcatcgccggcggcctggtgaacatcatcctgaccctcatcatctcctactgctccatcgtgatctccgagatggtgcccaagcgcatcgccatgcagcgcaccgagcagatcgcgcgcgccgtggtgcccgccatcgacgccttcgccgccgtctgccgcccgatcatctggctcatcggcaagaacacgaacggcatcgtccgcctgctcggcttcgacccgcagcagaccgagtccgaggtgtccgacgacgagctgcgcgtgctggtcagctccaacaccaacctttccaaggacgaacgcacgattctggacgatgtgttcgacgcgtccgaaaccatcgtcgccgaggtgatgcgcccgcgtgccgacgtggtcttcatcgagggcgaccagcccttggccgaggccgccgcgttcgtacgcgaccagccgtactcccgttacccggtgaccggcaaggatttcgacgacgtgatcggcttcgtgcatgtgcgcgatctgctggacgtgcgcgatccgaacgccaagatcgtgcgcgatgtggtgcgcgaaggcatctccctgcccggcacctccaagctgctgccgagcctggaactgctgcgtaagcgcggcatccatctggccgtggtcatcgacgagtacggcggcacggacggcatcgtgacgcttgaggatatgaccgaggagcttgtgggcgatattcgcgatgagtacgatctgcccagcgagaagggcggcgaacgcaccacccgcaccgcgttcgtcaatggtgtggccacgatcgaggccagcatgaccattgaggacttcgccgatctgaccggcatcgaattggaagacggcccgtacgagacggtcgccggctacttcctgtccaagaccggcaagatgggtgcggtgggcgacgtgctgcattccgacgacggctacaacatggtcatcaccaaggtggatggccgccgcatcgaaaccatcgaagtccgcaaagccggtgccccggaccatgcgccactgccagccgaatcacaaagcgacgatgccaactagccacgtgatattcaccacctattcgttcggcccggggcataaccaaaaatcgtagaattatatggacaggttccacctactgaaagaaggaacattatgacacttgcgtttgttgtgccgggccttgatgaagcggccagtgagaaggccatcgccatcctacagaaccgactgagccaggagcaggaggccgctctggtcctgaagcacgcacactggaacgtgaccggcccgaacttcatcgccgttcacgagatgcttgaccccgaggtcgaggccgtgctggctcaggccgacgagaccgccgagcgcatcgccactctgggcggcaccccggacggccgcgcggacgccatcgtgcgcaaccgcacgtggaagtcgttcgacgccgagggccgcgtgggcaccgaggagtatctcaaggcgctgatcgagtactacgacgccttcatcgccgacgaccgcaaggccatcgccgagctggacgagctagatgtgattagctccaacatcatccaggatcacgtgcaggaactcgaaaagttccagtggttcatgcgctctcacctggcataagtaaaagcagtattccgtggctcccctcaaagaggggagccactttcgtctcacgtgaaatagagagtctccacatacataagttggaaaagtgtataaaactccccattttgaggttggaaaacgtagccaaaaccgcattcttatggttggaaaagtgtaaaatatgcgctataaacagttggaaaacgtgcccagcatagatgcaaggcctacaaatgactggagattctcatgctgcgaagaaaaatcgagacacagctggaagcttggagatccgcgccgaaacgcactgcactgctggtcaccggagcccgtcagattggcaaaacctatatcatcaggcactttgcccaacagcattacgaccatatcgccgagctcaatttcatcgagaaccctgacctcgttgcattattcgatcggccccgcgatgccaaaaacctactgatgaggctggaactggccgtaaatacgccattagtacccggcaaaaccctgattttctttgacgaggtccagcgttgcaaggaaatggtcaccgcaattaagttccttgtagatgatggtcggttcgattacgcgctttccggctcgctacttggagtcgagctcgaagatatacgctcggtaccggtcgggtacctgaccgagctggatatgtatccactggatttccaagagttctgctggtcgcagcatatcggcaacgacgtattcgatatgcttgccgaatgctttgccaagcaccaggaagtggatgagttcattcatcaaaggctcatggagctatactccaaatatctggtcatcggcggcatgcctgccgcagtcgactcgttcgtggcaaacggcagcgttgcggacgtgcgcactatacaagagaacataaagcgtgaatatcgccgcgatatcagccaatacgcgcgcaaagaagaccggctgcatatccgcgctatctacgatttggtgcccagcgagttaaataacccaaacaagcgctttaccttcgccaaaatcgaaaagaacatgagattccaatcggttgcttccgatttcgattggctggtcaatgcggatgtagccgtcgccgcgtacaacgtggacgaaccgtgcacaccgttggagatgagcaaggaacgtaacctcttcaaactcttttacaacgacgtgggtctgcttaccggctcgtttctcaagaaaaccgcgctcgacgtactcgacggcaaccctgatatcaactacggttcaatctatgaaaatgcggtggcccaagagctacgcgctcacggatttgacctgtactactacaacagtaagaagcttggcgagctcgatttcctcatccaagaccgcaacgatcacgtgctgccgattgaggtgaagtccggcaaatcctacaaacgccatcgcgcaatggacaacgtgctcgcccaccctgaataccatctcaatacaggctatgtgcttggcccgtgcaacgtctcagtcgaagggaatgtaacctacctgcctgtatacatggccggcatgttccataacgaatgacgggccgcacacttagtcaacaagtacatgtcggtcagatggttcggactggtcagagggcccgctctgatcagttaggtcggtctgaacggactggctgggctggtcggcctgagtagcccgtttggaccgatccggttcgcccttgctggccttcacactgcttcagctccagctgaagttcgctgatgcgccgttcgagttcgtcgatgcgccgcacgtgtggcgaagtgagactaaggggagccgagagatggctcacaggccgagggcaccggccacggccatggcctcgtgttcgggatcggcctggccgatgtgtacgttgacgtgaatttcgtcatcgcccggctcttcgagaatgtcggactgggattgcagcatgctcggcttcatgaagtggccttggcggtgggaaaggcgttccatcacctcgtcgaatgtgccctgcatgtagacgaacaccacgccttgacggcgcagcttgtcgcggtagatcttcttcaacgccgagcaggtgaccacggcgggctcgccggcggccacgcgctcgtcgatccacgcggcgatggtgtcgagccaaggccagcggtcttcgtcggtgagcgggtgtccggcggccatcgagatggtggcgcattcggaccatgcgaacgaatccgatcaggccatcagccacatcgccggcactgaagcctgacccgtcatcgtcacagcaccacgcggcggttgaggtcgcggcgcagcgtcttccagccgggtaggtaggcggtcatgcggcgctggaatccggcaccgtggccgctttcccacaaatgcgtcatctcatggaccaagacgtattccaggaattgcggttccatcagtcccaattgaaggttcagacggatgcggccggttcgcggtgtacacgatccccagcgcgaggtcatgacccgtagcgtgatatgcgtgggctgccggccgacgaccggcccccacttggccagcagctgtggcaacgcggcgttgatcgcggccgccgcttgtcgtttgcgttcgtcggtccagatttgggagcggtcaaaatacggttggacattcgtaccggcttggcctggcccggcgtcaccaattcccggacgactgatatcaccggttttcggacgaccggcaacgcctccatcatggccgctggcaccagctacaccacgacctccgttctcgaagccggcgccctcgttcaatgccatgatggagcgccgttgcgcctcagccatgcgctgctgctgggcgagaatccacgaatgtcgctctttgacgaaatccgcaatgcgactctcgctcatccgcatcggtgcggagatttcgacgcggccgctcggcggtttgatgcgcagatacaggtttttgatgggtttgcgcgtcaggtgcagatggatgccatcaatatccaacgactgcccggcggcagcggaccgaacggatttcggcgcaccggacttcggagcggtggattgacgacggcgataaggcatgcaagtcattcttacacaacggcggacaacaagcggcacacaatgccgcccctcacgaatcggcaaccggcgctgctacattcaatccgcataccaactgcccacaccggagaaggtcgcgcaggagaaggcctcgctgctcgagatcgacgacagcttccagaagatcgtcctcgtacgcgacgtggtcaaacccgtccgcgacgaacacggcatcctcacgatgagcgtctacgatttcctcctcaacccggacagcctgacgatgtgacgccggatggccggcaaatgccccggaacgcagaccccccccactcctcgaacaccgccttcgcggtggccgaggacaccatgacgagacagccgagcatgatggcacccagcagagggtgccgaagttcgcgatgacgtactgccacaggtccgacccgtccgtgtagccgtcgaagcgcagcgccgcgacggggacgagaaatccgtcaagcgcatgcgcggcgtcagatacaccgtcctgaagaaccccggcaagctgaccgacagacggtccgaggcgtccgggaacctgcggtacacggaccccaagggccggccctaccgttcatgacggctcagggaacccctccggacgatgcccaaacgaccggccgaccaggccgggaccgaactggaccgccgggtgttccgggcgtcccacagccgcatccccgagatcgtcgaactcgcccgaaagatccgccgtcatgggcccgacatcctcgggacaatcgaattgggctgttcaaacgccaggctcgaggcgtccgacaacaggatcaaggccaccatccgcatggcctacggcttccaccacgcgaacaatcccatcgccctcgtcatgctccgccgcggcggactcgacatacgcccaccacaaccaagaacccaacccacgaaaacagcagaagcctcatatgtattggacatttctgcgcagagagggaggtgtaaccgcagcattacggtgtgagaacgcaaggttacgtagctgggcattggctgtggcgttgctggacattgaccgtcgagccggcaatcatggcgcaagcgacaatcacgacacgccgttattgacataccgccgttcaatggtattgtaattacttgtgcgcttttgaagcgtatggatcgggcccgtagctcagctggttagagcgcatccctgataaggatgaggtcggaggttcaagtcctcccgggcccacagaaaaaatgaagcggctgcgagccgctctttttttctcacggggctatagcgcagctggtagcgcatctgctttgcaagcagagggtcgccggttcgaacccggctagctccacagacaacccttggaataataccgattctgagggtttttgcgttcttgttcgagggattctcccagtgcgccatggccctctccatcgaaaaaggggtggtcctgttaaggaccacccctcgaggattcagaccaaccgcgtggtcattgtcgctccgtcttcacggaacggtacacgaaaatccttcgccttgcggcgatatcgcccggacccggaggactacaccttcctctcgggtggaaggtaccggcagataattggctcttccggttttggtgtgtagggggatgcttataggtgggcttgtatggtgtgtctgaagccgccggtgtggaggaggctgcgggtcacgccaaaaccggaagagccgttttcttttccttctccggtggtttcgtcgttgaccgtgttgccggtggcttccttgcaggcttgtttgtaggcttcggctgggctggtgtggtggagggtgcggatgcgtgcagcggcgtgttcgatgtgtttgagcgtggcggatggcgcgtcggtcaggccgtggcgggcgaggacttcgttgcgccacgagtcgtagcgttgctcgcgcaccacgcgtggcttcctccgccccctgacccatgcgtcggcgtacgcccaatcgccttcctcgtagatgtcgcgtgcccaggacgccgtcggacggtcgaacgggtaggggcccgccggcagcggcaacttgtcgaccgtcgggtcgaacacagtgaatcgtcgccgttccctcgcttcgcgttcccgttccggcgctgccagcgcctccgcgacgtccgagtggaacgcggccatgcgctccttggcgccggaggacgtgaacccgtcgtcgggttcgcgcagtccgtgctcctcgagcagcgggtggatgtcgtggtccatgagccagcggagccgggacatgttgaacgcgaggatgaatgcgagcgagattgcgaccatgaggcccatcccgacccccatcagcagtgtgctcatttcagccggctccagcgttcggcgcccgcgtgcgggctgaaacgtccccgccagtcccacggtccgacgaaacgcaaggccaacagaatcggggagcatgtggcgaggaacgcccagaagaaagccaaccatccaatccagtcaggtgtggatctgccggtgtcgacccattgcgcgctcgaccagaacatccacgtcatcgctatggggaagcccgatatcgcgatgaggaacagcgtgccgacgatggggccgccgaacatgtagcgcagcttcgtggcgggcatggaggaggcgaatgccaagtcctccagcgaggcggggacgtaggtgttcggccggccgaacacgagccggcagaaaccccagtacaggaggagtccggccagccacatcacggcgaccgccacgtacgtgttccatgcgtcgcgggatatagtgaccggtctgagaaaagccagcagcgtcacgtcatcggtatgcgtgtggtgcgtcttcgtgtccggggtgagcagccgggcgatgccgtggatcatgaccatcaggccgggcgcagccgcggcggcagcgccgccggccgccgcgccagcccgcgcccagccggaatcgccgccgaaatccagcttgcgcttgaccggcgtcttctccagcgtgtcccagaacacctgcgccccgtcctcaagacgccccaccaacacataccgagtgaacaacgccaacagatacctccacttccaaaacccgagattatccttgaaatgactgcccgggtcatctccaccgcctctgtgcacctgattgtcgtaaagtgcgtctaagccgctacttatcagccatccggctccagtgccaatcgccgttccgacaaatgcgccgaccacggtgccggcaccggggacgatcgatccgaagaccgcgcccacggcaccgccaacggtcccaccgaggccatcaacggcaggcccgagaccctacgcggcatcgccctcggcttccgcaacctcgacaactacgtcacccgcagcctcctccacaccggcggcttcagacacaccatacaagcccacctataagcatcccccctacacaccaaaaccggaagagccggatgattccctgcaagccgatcacgccaacccgacccgacgactaatcagattgaggacggctgaattaagcttgtgccctcatgatacgacatgtcctgcgaccgacgccagacacaacggcagcattctgcccaccatagggcgtgtctttaaccagaaagtaccctcaaatacgttcagcaagatatatgcacgcagaacagcccttccgcattatcttatttgacatagagcatgccccttccattccacagaatcaagcaaataaacgagcggagagactggacacaccgcaaaacaatggcccaacccctccgctcgtttgttatggaaggaagagggatgaataagtatgtttacttcactgacttgatgaagacgatcagcaccgcgccaatcagcgagcagaccgctgcaagcgggaagagtgcgtgatagcccaccgaggaaattagcgccgccgcaacatcccacgcaccatattcaggacaaatccagtccgttgttgtccttggctttgctcaccgtatcagtcaaatcggggtcgtccacagacaccgcgttctgctggctgagcgtcaacgacagcgaacctttgtaggagtcgccgtattcgtccttgccggacacgcttacggcaatcgagctcatcagacgcttcctgccgtagttcagatccacggtgatagtcggcatatccggctcttcatccgtgccgaagtcccagttgcgcacattgtcgagcgcctgacggtactcgccttcagcatcgcccacaccggtatcctcgatctgctgaatcacccatgatttcagatgcggatactgcgcttcatggctgatccagtaattcacaaagtgctgggccaatgccttgacatcgatttgatacgagagctgcgtgttgccggcagacttggcagacgatgtattcgggaacagctggctgcgcacattcttatcttccagctccacgccgagatattgttggatgaatttgctggcctcggccttcacctcggcagacgttttcgtgcccttggcccggtcgatgtcgttcgagtacccatcgtcgttcatcttgtccagctgatcgtagaacgttcgctccgcgccggtgatgtcccaagcaccgttcttgaccaacgcatccttgacgttcaatatcaagtccgccacatcactaccaacgccgttccttaagtcatcttcatattggtcggccgggtagtagatgtagtaggggtcgtcatcataccaaacgtttttcccggcgaatgcgcctttgtgccaagcgagggttgttgcctgttcatctgtcttgatggtcacagacgcggaggagtcattggtggttttgccccagcgaatacatgccagacatccgcgcgtcaagggagtcgtcagtgctgctgtgggttctgagttcgtatttggtgctgcgcagagtggacagcgagttgatcgcgtcgaaggtgacgaccagcggattggtgggctggaagcccagcatcgctttgacggcggtgaagttggggacgatgaatgccaaggccgccaccagaatcgtcgcaagcaatgcgcagagaacggcgatcagcttcttgctggatttgcgcggcggtgccaggacggcggttgcatcagtcgcctgatatgcggcaggagcgggaatcggcaaagctggcaagggagcagttggtgccggctgtggggcagcgggcgcggcgtaaaccgatggggcaaccggcgcggctggtatcgatggtggtactgaaggcgctggcacagcaggtgccggtatcgacgcagtcggtacggctgacgatgcggccggcactggtacagacgcaaccggtgcgctgtctacagacgctccacatgccgggcaaaatcgtgccggcctatcaactctatttccgcagtggccgcagtacgccatcgtgtgcttctcttcctcaaatcggcttgattgccattgcttcaatgttactcttcagcattacgcctcagccagcccctacgcgtaacgatacgaaacgcggcagccttaatgcggttgttttgacgcgatgtcaacttgaggctagactgtgccgtgagagaaattgacgctgcgtcaacatagcggcgtctataggcgtctcagcaacccaatggaggactgcgaggcgcacagcgcacacacggaaaggaccgcttatgctgtttcaggtctacggcgacaacgccatctaccaatggatcggatggatactcgtcttctgctgtcttatcggcgccaacgaactggcccgccgcaccaaaaccggtggcgttatcgccttcctcgtcataccggccgtgctgaccgtctacttcatcaccatctacacggccgccgccatgggtgccgactgggccctcaacaacccgacctacgtacacatgaccagctggttccactatgccaagctgtacgcggccaccatcggctgcatcggtttcatggccctcaaatacaagtggggatccatcggcaaatcgcactggttcaagtgcttcccgttcgtgatcgtggccatcaacatcctcattgccgtagtgtccgacttcgaatccgccatccgcggctggggcaccacgtggatctccaccgaaggcgtgaccttgtacggtggctggcacaacgtcttcaacggcgtggccggcctgctcaacatcttctgcatgaccggctggttcggcatctacgcctccaagaagaaggacgacatgctctggccggacatgacctgggtgttcatcgtggcctacgacctgtggaacttctgctacacctacaactgcctgcccacccacgcctggtattgcggcctggcgctgctgctggcacccaccgtggccaacttcttctggaacaagggcggttggattcagaaccgcgccaacacgctggccatctggtgcatgttcgcgcaggtgttcccgatgttccaggactattccgtgttctccacccagtccgtgaacaatccgaatgtgaaccttgcagtctcgctaatcgcgttggcggccaatgtgctggcacttggctacatcctgctacgcgccaagaagcagggcatcaacccgtggaccaaggaagtgttcaaaggcaccaaggattacgagcaggccatcgctcgcgccgacgaggccgaattggcggcatagcctcgctttaagcctcaggccaacacctccatggggtgataagtggcggtgtggtgtccggtgatggggttccatacccgttcggcgaatgcgcgcagacgggcgacgccctcacgcagctcgccggcatctccggcgtaggagaggcgcacgaagccgcgcccctcctcgccgaaggcctcgccggggaccacggccacgtgctcttcgtccagcagacggtctgcgaattcaccggagtcaaggccagtcaggcgtacgtccacaaaggcgtagaacgcaccttgcggttcaatcaagcgcaataccgggcatccggccagaccgtccagcacgatctggcgcttggcgcggtattcctcgcgcatggcggccacatgatcctgcggaccggccagtgctgccacgcctgcgtattgcgccaaggagttcaccgaggagtgcatgagttcggcgattttaccggtctgttcgatgaccgcttcgggtgccagcaggtagccgatgcgccagccggtcatcgcgtaggttttcgacaggctttccaccacaatggtgcgctctttcatgcccggcaccgcggcaatcgatggtgccacggctgcctctcccccaagcgtttccccgaacgtttccccaaacacgaacggatggtaaacctcgtcggagatggcccaaatattgtgctgcttgcatacttcggcaatacgcgccagttcagcggcagaagttaccgcgccggtcggattgccgggtgagttgatgattacggcgcgggtgcgcggggtgatcgccgcttcgatgtccgccgcgttcacgcgcatgccgtgctccggacgcagcgccacggtgaccgggcggccgccgcacagcatcacttcggcgtcataggaagtgaagaacggcgagggaataacacttcatcgccggtgcctaccacggctttcagcgccagaaacaggccaatcgtggcaccgtcaacggcttgaatctcggtttcgggatcataagtgagtcccttcacacgggcggagtaatcggccacggccttgcggtattcggggacgccgagcacgttggtgtaccgagtgcggccagcctgtgcggcctcgcaagcggccgccacgatatgcggcgcggccgtggcgctgggctcccccacggtcagtgaaatcgcgtcaggcacgcgctctacacggtcgaatacgtctcggatgccggagcgcgggatattcagggcttcggcggacaagctcgcgggcttggcggtcggcacagcaacccgtctggcagcaggcacagcagcagatgcaacttcggacagaggcatgttggaaaacttctgcatatcatccctcctcaatggaattatttcgtcgttctcttatttcagaaggaattattacattcaattaggactttaggcataaacattccaccacacaacagaaaacacaggaagaactactgaaattaccaggcaaaatcggaaagccatcgcattccggcaacaggtacagtgaacacagagcacaacgaacggagaagacaccatgaccgcgattgacgagaccgaccagcgcatcctcaccatgctggaggccgacggccgcgccacgctcgcgcaactggcccaggcgaccggactgtccgtctccgccgcccagtcgcgcgtgcagaagctggagaagcgcggcatcatcaagggatacaaggccatcatcgaccaagagcagcgcggcttgcccatcagcgcgttcgtcaacgtgaccccgctcgactactcagccgaatcctcgattccggacaagctgaacaatatcgacggcatcgtctcctgctattcggtggccggcgcccccagcttcgtactggtggtacgcgtggcctcccccaccgcccttgaggaattgctcaatctcatccaccgcacggtgccggtaagcaccgagaccacgatgattctgcagacctacttcgcgcactgaccgcgaacccggtaacctgcgcgccgaagacctcggcccctacggcgcacgattcccaacgggcacatccgacatcacccaagtccacctttatgtccactatatgaacgcaccttcggtgtgatgcagcttccatttcgacccgattcacgcacagacagacatccagcaatcgccgaaaaatctaacaaacggaaacttgaaccaccccataaccacgccgatagctttcccgttatccgagcgagactctatgcagcaagggcctgcgcgcatagaataaaaccgtcttaattccctagcaaatcgaggagaatcatgctcactgacgagtacatcaagcgtgtctacgaccaggtcgttgcccgtgacggcgatcagccggagttcctgcaagccgttcgcgaggtcttcgagaccctgcagccggttgtcgagaagcacccggagtacgagaaggccggtgtactggagcgcatcgtcgagccggagcgcaccatcaagttccgcgtggcctgggttgacgacgagggcaaggttcaggtgaaccgcggctaccgtatccagttcaactccgccattggcccgtacaagggcggactacgcttccacccgaccgtgaccgagtccgtcgtcaagttccttggcttcgagcagattctcaagaactccctgaccacgctgccgatgggcggcggcaagggcggttccgacttcaacccgaagggcaagtccgacgctgaggtcatgcgcttctgccaggccttcatgactgagctgagccgccacatcggccagttcaccgacgttcccgccggcgacatcaacgtcggtggtcgtgagatcggctacctgttcggccagtacaagcgcatccgcgacgagtactccggcgtcctgaccggtaagggtctggaattcggcggctccctggcccgcaccgaggccaccggttacggcgtgtgctactacacccaggaagccctgcgcgtgctgcgcaacgactccttcgagggcaagaccgtcgtgatctccggctccggcaacgtggccacctacgccgctcagaaggctgagcagttgggcgccaaggtcgtcaccgtctccgactccaacggctacatctacgacccgaacggcatcaacgtcgaggtcgtcaagcagatcaaggaagtcgagcgcggccgcatcaaggaatacgccgagcgcgttccgggctccgagtaccacgagggcagcaagggcgtgtggaccgtcaagggcgacatcgctctgccgtgcgccacccagaacgaggttgatggcgaatccgcacagaagctcgtggacaacggcgtgaccgtggtcgtcgagggtgcgaacatgccgtccaccccggaggccatcgaggtctaccagaagaacggcgtgctgtacggcccggccaaggctgccaacgccggtggcgtggccgtctccggcctggagatgagccagaacagctaccgcctgtcttggaccttcgaagaggtcgacgccaagctcaagtccatcatggaagaaatcgtcgccaactccctggccgccgccaaggaatacggtcacgagggtgacctgatgctcggtgccaacgccgcaggcttcgtcaaggtcgccaacgccatggttgcccagggcgtgctgtgacgcttgcctctgagcagtactaagcagtagcgtaatgcccttgcttcccgtgaggaggcaagggcattgctatatgtacaacgagcaacaagtgctatccccaaatacgtaagcccgataacaacttagcttccacctccataaccccggaactcaccaccgtcgatcagcacatggatcagcgcgctggaccatggccgacgtagtcatcaaagccatcaacggagtctcttcaccgcgcgtgatgcacctgaacaccgatttggtggtgcgtgattcggcgtaattgccacgtggctgtcggcaggactctagataccgcgtcacaatcacccagtaatgcatcacgcagtgtataactcttccgcggaaacgaacaccattcgttcatcatccatgtagcgggttcgcgtggactcactcaccggattcttggtgaacagcataagccacgcattacctgcctgatagccgcggactaagccagcacgctgatggagcttttcaatagcctccgtttcgttgaatgaattacgccatttgcattcaccgaacagaatcgttttatcgagcgaatccgcagcaatcacatcgatatcggtttgctcgtgagcaatcggatcattgccccaccatttgccgaactgagtggcaacaaaggggaggttgcccatagcgttgtttcgaataagccattgcaggcaaatcgtctcaaattgttgaccaacataggtatcaaacgctggtccaaaagcgagtctgctcgtaacctcctcgctgatattaccatccaaaatgctcatgttgcgccccacaaagcggaaccaatatgcaaagaagggatcgctcaccacatacattcccttgcgcgatttactcggatcttcaccaaacggcacttttcgctcaattaagcgcaaatcgaccagcgttttcagatatgctccaatcgaatcagatccgacacccgcatgttcagcgataagctttggcgaggaattaccacccgcaatagattgcaatatcgaataatacgatgccggttcacgaagctcctgacgcaacagcatcataggttcctcacgcagtacgcccaagttgtcgaacatcaagcgcagcacattggattcaaagccatcggcttcctgtatacgggccagataatatggcgtaccgccgaaagtcgcatagtattggaccagttcttgcggagatgtgttcgttagaaattttgccgcatccgcatagtcgaatggcaggagtcgaatctgtgctgtacgacgcccgtatagcgggcttttacgccccaatacgtcgttttccatgaatccctcgttactaccggatagaatcatcgtcacttttgtggcgaggaatccatggtcaattgctatctgcaacatggagggtaatgctggctcggcggcagctgcataagggaactcatcgaatacgaacaccatacgttcgtcagtctgtgcagcacgttcagcaacaaacgataacgcatcagaccacccgccaaacgacggggtggaatccggcataccaaagaacgacaatgccgctcttgagaaatcttcaagattcatcttggcgctttgctgtatggccgtgaagtacagcacgcgtttatctttgacaaattcgtcgatcaacgccgttttccctacacgccgtctaccgtacagcaccaccatttcgaacgaatcgctggtaaacagcttttccagcacttgtaactcgtgctctcgtgcgacaaacattgcagccctccgatccgcctactgcccaataataagagtatcatggttaatgtaatcacgattaccttaattatgatactgataattgttgccctaccgcgaggaggatcttccttccgctgtcaaaacgaaagcccaacagtccagactgacgagcagcaacatcggcagatcaaccgctgacgccagccagcctgacagcacaaatctgtatttcgtcaagtcggtgtttcgtgtttagtcatgtatttttttcgggtttaggcagttgcatgcattttccttatttttccggttgcgcggaggtgttcctgccgaacatgagggcctcactgacgcggcggctctggccggtgaactcgaggagccgcccgtggtgcacgatgcggtcgatgatcgctgcggcgagtttgtcgtccgcgaagaccgtgccccatttactgaactcgatgttcgtggtgaatatgatgctccgtctttcgtagctgcccgcgatgatctggtagagcaggcgcgccccgtcgatgtcgaagggtacgtagccgaactcgtccagtatgatcaggtcggcacggccgatgtcccggagcatcgtctcgagcgtgccgtcgcgtttggccttgcccagctggaggacgagctcggcggtctgatggaaccgcacgcccagccccatgtcgatcgccttcatgcccagcccgatcgcgagatgtgtctttccgcgcccggtcttgccgtagaacaccaggtcctgcgcgcgcgggatgaaaccgagccctaggagctcatcgagcatgtagccgtcggggagcctgacgttcgtgaagtcgtagccgtcgagacccttgacgacggggaaccgggcgcggcgcaggagcctgtcgtgcttcgcgcgttccctgttcgccagttccgtgtcgagcaggcggtggacggcgtcgacctggcggggcgtggcccagccggcgaattcgtcgatgctcgccttggagatgaacagcttgcgggccttctcgtagagcctttcgtccgtcttcgtgttcatcgcccgccttcctgcacgccgacgtccgcggtgaacgcgatgtcgtattcactcagatccggcctgtcatcgtcgtattcgatacccgccacgccctcggcgagcctggccgcgagcagtgtgacaccggcgcggtccgccccgccggtcgattcgaggatggaaagcatcgcctcgaccgcgttcgcccacccggattccctgtcaacgcgtttgagggtctgcagcgcctcgttgcgtgtctgtctgtcctgccgatccagccattcccgcaacgggtccggcaacgcgtcacgtacccggctgttgggccaggacgcgggcttgttgcacagcagcgccaactgcatggacgggtcctcgctgttcgtgctggcctggccgtacgcccgaggatgggtcgccagatgcttgcccgacgagtcgaggacctcgacctcgagcgcgcggaggcccacgatcacccctctgcccgcgttcgcccggtccgcggaataacgatgccgtccctcgagcgtgaccacgccgtaccggtcggccttcatatgccgccacgtgaccacgtcgaaacgcttcccgggcaacggcagcagcgccgcacggtcctcggagaacaggccacgttcctccgtgtccttgcggcagtgcggtttcgtggccagctccaggcaccggtccggcagcccggcgctgaagttctccaggctccatacgctcggccggggcacgaacagcttgcgccgcaccatgccgaccttggactccaccgcgcccttctcatgaccggaatacgggttgcagaacgaacaatcgaacccgtaatgcgcctggaaggcctggaacaggtgcgtcaggcgcggctcgcgctccccgtaccccttatggcccacgccggcggcgttatcgaacacgatccgctccggcacaccgcccagccactcgaacaggttgcgcaacgccaggcacgtgcactcagcgttctcgcccggcatcaactgcaccagaccgacgttcgaatacgggaaatcaagcacgaaatgatgcatccgctgcaccacgccgcgcaacagcacgtcgacctcgccgaaatcggcctgcgcctcgcctggatgccataccagatccatgaacgcctcatcacgctccgccgcgaactcacgcctgagccgcgccaccgcccgcgtcaccgtggacagggagacctccgcgccatgctcgtccctcaaccgctcccagatcctggtcgcggtatgccgctgcttgcgccagttcgcgcgatcctccgcgagccactgctcgatcacgggcagatacgggtcgatcaccgacgcgcgcggctttctcaccgacggcacggccgacagatcctccttcgcgaggtacttacgcaccgtcggctcgctgacatgtgttttccgcgcgatcgacgcgacggattccccgttccgccgcaaacgacggatagactgtacttggggcatgctgatcataatcctttccggtcctttctggcggagatacaagcaccatccagttaagaccattccgtggtcggcatgctctgcctaaacccgaaaaatcatcgtgactaaacccgcaacaactaattgaacacaaacacacaaatcagcctgattgcaggcatataggcactagttagcgaaaccggctcttcgcattttggtgcgtaggggccgtgcggtttgattcggtgtgtgattgaaaaagtgaatgaaaccgcacggcccctacacgccaaaaccggaagagcccataaagtcccctcagtagcgccaacctgccagtcctttggcggaaccacaccacatagaccttcctcaacggcgccaagctgccacacgctggcagaccaacaccgctgtgtgcattctctgcgtcggcggcagtccaaaacttggcccagcaacgacgcttgctgtgcccagcgtcggcagagggccaagaattggacgcaaacgacacagaacacaccctcagcatcggcagaactccaagatctgtaccgctgacgacggtaagccctccacagcgtcgtcagagatacaaaatctgtcccaacaccgacgcctgccacccccagcgtcgccggagtcccaagtctcggcccagcaacgacgcctgcgatccccacacataagaaaccgcacctccgatcatcgaatctgaattacttcagtccaacaaccggggtgcggttcactgaggggagttccgtcagtatagctatatcagtcgtcgccgagcgtaacgtgcacaccgccgaccagagagctgaccacgttgtagatcagtgccgcaatggtggccagcagagtgaagatcaccacttcgacaatcgagaagatggtgacgccggagaccacggtggtaagggacaacacgttcttgagatcgaaaccgcctgcatcaagaccggtggaagacacaatctgcgtaatctggctgaatacaccgaccacatcaagcagcacccatacgatcgcggaggcaacgacctgaataattgccacggcgatggacagcatgaacgtcaccttggccacggaccaagcatccacgcgggtcagcgacaagctcatgcggcgagccctgggggcgctacggcgaggtgccggacgcacgggagtggcggcacctgaggaaggcaacgcggattcttccggatcgctggacacggagcgtgccacgcggggagcgtgctcagtaccgatcagcggctcgacatgctcgttctgcgtattgccgactgccggcggtatgatccggggctcgttgtcttcgagattctcgctcatcgtttctccttaacaggcttggcggtagcctctgctgtatgcgaggctaccagcttttcaggacgctgctcacgcctcgtccgcgttgttcacattctcgccggattgtgcggtctcggcggtgccgttcgccgcggcatcgccgccatcctcgggctcgtccttctcctcgttacgggcgatggagagaatcgtgtcgcccttgtcgggcttggcaaaggtcacgccctgggtgttgcgcccggtgcgcttgacttcgtccacgttggagcgaatcaccttgccggacttcatgatggccatgacctgatcgtcttcggacaccacgagcgcgccgaccagagcaccacggccctcgaccagttgcacggccttgatacccaggccattgcggccctgcagacggtattcgctgatggcggtgcgcttggcgaagccctcgttggtgaccacgaacaggtccttgtcggagtcgccagggaccacatccatggccagcaggctgtcgtcgttacggaacttcatgccctgcacgccggcggtctggcggcccatcgggcgcagctgctcgtcgtcggcctggaacttgaggctcatgccgagcttggagaccaggatgatgtcgtcctcggcgttgcacagcgcggcgccgatgagctcgtcggcgttctcgccgttctcgtcggccatgaggcgcacggcgatcaggccgccctggcgcggggaatcgtactcggccagcggggtcttcttgaccttgccggagcgggtggcgagcaccagatacttggccacctcgtagttcgggatggacagcacggtctggatggactcatcaggcgcgaactgcagcaggttggccacgtgctggcccttggagtcgcgcgagccctcgggcagctcgtaggccttgatgcggtacacgcggcccttgttcgtgaagaacagcagccagttgtgcgtggaggtcaggaagaagtgatccaccacgtcgtcctcgcgcagcttggtgcccttgatgcccttgccgccgcggtgctgggagcggtattcgtcggccttggtgcgcttaatgaagccggagtgggtcacggtgaccaccacgttctcttcggcgatcaggtcttcgacgttcatctcgccggagaacggcaggatcttggtacggcggtcatcgccgtacttggcgacgatctcgtcgagctcgtcgccgatgatcttgcgctggcgttccggcttggcgaggatgtcgatgtagtcggcgatcttgcgctgcaattcctcatgctcggccacgatcttgtcgcggttcatgcgggtcagcgtgcgcagctgcatggccaggatggcgtccgcctgcacctggtcgatgtccagcagccccataaggcccgtacgtgcggtgtcggtgtcttcggaggcacggatgagggcgatgacctcgtccagcatgtcgagggccttcagatagccctgcaggatgtggtcgcgctcttcggcctcgcgcttcaagtacgcggtgcggcgggcgatcacgtcgagctggtggttcacccagtggcggatgaaggcatccaggctcagcgtgcgcggcacgccgtcgaccagcgccagcatgttggcgccgaaggtctgctgcagctgggagtgcttgtacaggttgttcaggaccaccttcggcacggcgtcgcgcttgagcacgagcacgaggcgctggccggtacggccggaggtctcgtcgcgcatgtcggcgatgccctggatcttgccgtcgcgcacggcctcacgaatggagacgacgaggcggtccgggttgacctggtagggcagttcggtgaccaccaggcacatacggccgttgatctcctcagtgttgaccacggcacgcatggtgatcaggccacggccggtgcggtaggcctgttcgatgcccttgtggccgaggatggtggcgccggtggggaagtccggtcccttgatgatgcggatcaggttttccagcagttcctcgcggctggcgtccgggtggtcgagcgcccagtggacgccgtccgccacctcgcgcatgttgtgcggcgggatgttggtggccatgccgacggcgatgccggcggagccgttgacgagcaggttcgggaagcgcgcgggcagcacggtcggctcctgggtcttgccgtcgtagttgggcacgaagtcgacggtgtccttgtcgatgtcgcgcaccatttccatggccagcggggccatacggcattcggtgtaacgcatggcggcggccgggtcgtcgccgggggagccgaagttgccctggccgtcgacgagcatgttgcgcatcgaccaggactgggccatacgcaccaaagtgtcgtagatggcgaagtcgccgtgcgggtggtacttacccatcacgtcgccgaccacgcgggagcacttgttgtagccgcgatcggggcggtagccaccgtcgtacatcgcgtagatcacgcggcgatgcacgggcttcatgccgtcgcgcacgtccggcagggcgcgctcgacgatcacggagagggcatacgccagataggactcgcgcatctcctgctgcaggtccttgcgctggatgcgttcgccggtgtccatcaggccgtagtcggtagtgtccgcctcctgcgggctcaacggctccatcgagccgtccggcgtgaactgctcgtcgccggtgttgttttcatctgccactgttgttcctttagttgtctaagtccgttgtgtacctccctctgacgagggaggttggaggattccgttacgcatcaatccaacgcacgttcttggcgttgcgctggatgaagaggcggcggggttcgacctcatcgcccatcagcatcgagaaggtctcgtcggccgcggcggcatcctcgatgtgcacctgcttcagaatgcggtgctcggggtccatggtggtctcccatagctcctggtagctcatctcgcccagacccttgtagcgctggatgccttcgcccttgggcagctggcgtccgttggccttgccttcggcgagcacgcggtcgcgctcggcgtcggtgtacacgaagtcgtgcgggcccttggtccacttcaggcggtacagcggcggcatggccacgtacacgtagccggcggtgatcatcgggcgcatgtagcggaagaacagcgtcaggttcagggtggcgatatgcgcaccgtccacatcggcatcggccatgatgatgaccttgtgatagcggaccttggagatgtcgaagtcctcgccgtagccgccgccgaccgcggtgatcagcgattcgatggtgtcggacttcatcatgcggtccaggctggcgcgctcggtgttgaggatcttgcctcgcagcggcaggatggcctgcgtgatcgggttgcggccctggatggcggagccgcctgcggaatcgccctccacgatgaacagctcgcactcttccgggttggaggactggcagtccttgagcttgtcgggcatgccggcggactcgaagatggacttgcggcgggtgttctcgcgggctttcttggcggccagacgggcacgggaggcctcgatggccttctggatgatgttcttggcctcggccgggtgggcgtcgaaccagtcgccgagcttgtcggtcatcacgcgctgcacgaaggtcttggcttcggagttgccgagcttggtcttggtctggccttcgaactgcgggttggtgagcttgacggagatcacggcggtcaggccttcacgcacgtcgtcgccggagaggttctcgtccttgtccttgaggatgcccttgtctcgcgcgtaacggttgaccagcgaagtcagcgcggcgcggaagccctcctcgtgggtaccgccctcggtggtggagatcgtgttcgcgaaggtgtgcacggcctcggagtaggcagtggtccactgcatggcgagttcggcggagatgccgagcttcaggtcttcggcctcgaagctgatgacgtcctcttccaccggcgtggccttgcgcaccttgaccagatagtcgacgtagtccttgatgccgttgaggtactggtaggtgacggtctggtgctttgcgccgggctcgtccgcggcgtcgccggccacctcgtcgccggcctggtcgttctcacgctcgtcagtcaggctgatcttgaggcccttgttcaggaaggccatctgctggaagcgggaacgcagcgtctcgaagtcgtagatggtggtctcgaaaatcttcgggtcggcccagaaagtcacagacgtaccggtggactcaccttcggtcatcggctcgccctgcttcaagggcgcggtggggtgctggtcgatgtacgtctgggtccagtggaagccctgacggcgcacttcgatgtccacgcgggtggagagtgcgttgaccacggagatgcccacgccgtgcagacctccggacactgcataaccgccgccgccgaacttgccgccggcgtgcagcttggtcatcacggtctccacaccagagacgccctcgccgggcacctcatcgaccgggatacctcgaccatcgtccaccacacggatgccgttgtccggcagaatggtgatctcgatatggctggcgtatccggccagcgcctcgtcgaccgagttgtcgacgatctcatagaccaggtggtgcaaaccgcgcgggccggtggaaccgatgtacataccggggcggatacgcacggcctcaagtccttcgagcaccctcagatcggaggcctcataatgctcgggggccatggattcgtcaagttcgccttcggtcaattccgcattgttgatgcgttccgcagccgccttcagctgctcctctttgctggtttcgtctgccaacaggcttccttccgtgactacagggtcaacctccgtcatgaaggtcattcacggaggtgatatggcttacgaggcccgtaaagggctcttctagccatttgaccatactgcatgtgattttactcgtctaacccgacgagcgtcatagcgaggcttctgcgaatttgtttggtatcttggctaccgccgccgagcccatttgcgtgtgtatccggcggccgggccggtcacgcgaatctcggtgatggtcaatcctttgagattgcgacggatggtatcggtgagttgggggataaggtaggtcagctgcgtggcccagaccgtggattcggcgcggatggtcagtacgccgtcagtgaaatcggcgactgccgaatggctggcgatggcctgacccaccacttggtcccaatggttgcgcaattgcgcaagcttcatattcgccgtccagacgccgttgccggcgatggtggtcatcacgctgcccagttcagccggatcgcgccccggtttgccgaagttttcgatggcctcttcacggcggcgtctgtagtccttcaaggtcgccccgcgacgggagagccgctcgaatatttcggccggcagtttggtctcgtccaggttgagttggcgggcgatcggcgggttcatgacactttccgttctacggacgcgctgtccaccgcggttttttcgtcatacccacccaaactctcattttcccgcgaattggacaaattgcccagagttggcaatatcacggaagctggttcgtccagtgcggccacgtcgatgcgatgggccgattcatagtcgggcacatcgccttcagcggccacggtaatcagcacctgatcctgttttctggcgaaatcaagaatctgcgtgcgccggctgtcgtcaagctgggcgaacacatcatcgagaatcacaatcggctgcaatcccaaccggtcacgcactatttcgaacaatgccattttcaaggccaacgccatcgtccacatctcgccgttcgaagcgaactcgcgggcgggaataccgcccaactcaaggttcatgtcatcgcgctgcggaccgataaggttcacgccgcgagccacttcaccggggtagatgcgttggaaatgctcgctaatctgcggatgcggatcgtcgaacatcagcacttcgtcgaatgaaggcgcataagtgagcgtcacctgctcgccggcaccggccaagtcggcgtaaatcgcggcaaatggctcggcaagcagaccgatcacatgagcgcgcatacgggtcaacgccacaccggcttcgatgaactggccggtccagatttccaaaccgctcagaaccgcatccatcggctggccattgttgacattggcattcaattgcttcaacaatgtggcacgctgtttggcgatgcgcgtgaactgttgcaacgtctgcatgtatccgggctcgagcagagccgcagcctgattcatcatggtgcggcgtgctcccggatcgccggacaccaaccgctgatcttcgggagtgaaggaaacgctgggaatcttgccgatgatatcgcgcagatacagcgacgaccccgagttgatgcgggctcggttggcaccacgcgcatgaattgacgcttcatacgtagtggtttgaccggcatcatcagcgacgttcgcgcggatggtggccgtggtctgcccgcgttcgatcagcggcaacgtgctggacgtgcgatggctcgatccggtggacagcacttcgacggcttccaccagattggttttgcccagaccgttcttgccgaacaggatattcacgcctggtacgaaatcgaccactacctgactccatgagcggtagtggtcgagtgcgagacgggagatgtgcattagcgaatcgttggaaattcagggatttcagttgttaaagcgcatcggcacgagcaggtatcggtagtccatggactcgtcggaatcagcttcctgctggccattgaactcgaccggcttgaccggggtcgtcattttgatgcgcacgaatggttcggttacggcggacagaccctccttcaggtaggacgggttgaatgccacggtgatgtcgtcgccatccatgtcgatgtccagtgtttcgttggcctgagcctcgtcgaccgatccggcggacagcgccacttcctgaccggtgaaggtcatgcgaatcggagcattgcgttcggcgaccaaagccacacggctgatggcgtcgagcaaatcctgcttgttgactacggcctgaatcggatattcgtcggcgaacaggcggtcgaccgccgggaattcaccgtcgatgagctgggaggtggagacgcggccggcgttttcgaagccgagcagcgtcgggctatcggcatcgaaatcaaggcggatgttctggtgctcgtcaagagcacgggccacatccttgagcagggagccgcgaaccagcgtggtggtgtcgacgtccgggttctgcggagtccaagtgaaggtggcgcgggccaaacggaagcgatcggtggaggtcatgacgaccttgtcgccttggaattgcatgcgaacgccggtcagtaccgggcggttttcttcgcgggagacggcaacgcacgcctggttcacggcctgaacgaaagtcggggcatcgacttggccgagcatggccggtaccacgggcagatccgggtactcggtgtcgggcatgagctgcaaggtgaacttcgacttgccggacgtgatggtcagcgtggagccgtcggtgaccaggtacgttttctccgaacgcagcgatttggtgatatcggccagcagcttgccctgaaccagtacggaaccggcttcgtcaacgccggcttcgatgtggtggcgagcggaaatctcgtagttgaaggcggagaattgcagcgttccgtcaatggcttccagcttgacgccagcgagaatcgggttggagggacgtgcgtcgatgactcgggaggtccaggctacggcgtcggccagggctgcggtatcgatttcgactttcatgtgtgattgttcccttcgtcggattggctgaggaatattctagccgttaggtggcgaacttacgtacgctggatgaccggctgttactatggcgatgatgcttttcacgtaactgagtaagtaatcgccataataaggccggtggatagtgtggataagtagggctgagccctacaactgcaacggttcataagtccctgaaaattgtggacaaattctgcatggcttgtggataagtgggcgagttttccacagccagttcgtcgaatttgagttttccacatcgaggtcgcggttatgcacgagttttccacaacaaaatagtgggtaatccacgagttatccgccgagtttacccacatctgtgcacaactatgtggataacttttttggttttcgcactttcgcacggcgtgttgaagactgtttttcgtcgaggagaatcgattctggagaccgttttcggcacttttccgtctcgctcgcccaaacccgcaaaatcggtcctcagaatcgattctctcgtttcatggtttttttgcgtgttccccttcgaaactcccctcagtcgtctgcgccgacagatcccctcacaaaggggagccatgaggaatctaatgtctcgaatccgttgcctcgacgtatccaccagaatccgcctgagcaaccaaaaacggcacttttcggaaagtcagtccaaaaagtgccgtttttcgtctctcagaagcgttgtgtcagttggtgttgctttgcttgaggcgaaccgtgagctccataacgtagttatagatctcctgtttttgctgcattcggtcactgattcgagtgcaggcatgcattactgtggtgtgatcgcgtccgccaaagacctggccaatatccatcaggctcatactggtcatttcgcgagccagatacatggcgatctgacgaggaacagccacgtttttggttcgtgatttaccgacaagatcctcaaacgtcaggtggaagtacttcgccacctgactgatgatgtccgtgggcttgatttccacatcggtggtgaagaagtcctgcaacgtctgctcggccaaggcgcgggtcaccggctgattactcagcgaggccacggccgtaacacgggttagcgcgccttcgagttcacgaatgttctcggtgaagcgttcggcgatgaggtccaacacatcgctggggattttcgagccgttcatcgaggcgatcatgcgaagaatggcgattcgggtctccagatccggcggcttgacgtctacggtcaggccggattcgaagcgcgagatgagtcgagcctcgaaacccttcaaattcttgggcgctacatcggaagcaatgacaatacgcttatttgcctgatgcagtgcattgaacgtatggaagaactgatccaaggtggcttccttgccgccgaggaactggatatcgtcaataagcaacacatcaacctgtcggtatcgacggttgaattcagcaatctgaccctggctttggttcgggttttgcagcgcgtcaatgaattcgttcgtgaattcctcagacgtgacgtatcgaaccttcagcccgggatccttgaccagtgcatagttgccgatggcgttcagcaagtgggttttgcccaggcccgatccgccatagatacacaacgggttgaaatcctgcccggaaccttcggccacggccagtgcgaccgtacgggcaaaacggttggaatcgccgggcacgaaggaatcaaacgtgaagttcttattgagatgagtctcgggatcgcgattcatcttctgctgaccgaccgggaactgcggctcggtggcgggcatcggttcccgcggtgcggctgccggctttgcaccataggattctttaccgaattcggcgacagtcggagaaatttccgaaggatatggctgcgccggctttgcctccgaaagcggttcgggctcggttttcggcacgaccttgaacgcgggaaacatattttcgccggttaccgtacgcaatgcctgaagcagggaatcgttcaaatcaccctgaatggcttgaagcgtgtcgttgttgtccacacacagcacgatggtcgaaccgaagacgccttcaggaacaacgccttccaaccagcctttttctcgtgggctgagcgaagcgctgtgtttgagcaccgtcagcgtgtctgaccagatgtgggcggcctcgattacggggtcgccggaagcgttaaccatggtggccccttctgtcgctgtggcgaaatacgtacaacagataatatttactctggtttagacaagttatccaccgtgtcgcgtgttgaaataactggattgtgaataacaaacatgtaatttgtggataacttttggccgtgaatggttggtattccgccgattataagagatttggggcgtgtctcgcaacgtgtcgaaatgtgaaaatactccgtccgttttgacttgagggtaggggtgagagtactttggtatagcttgactcacgtgagggcagcgcgaagcgttgccgaatagacctaggagcaatggattatgaagaggacgttccagccgaacaaccgtcgtcgccacatgaagcacggcttccgcctgcgcatgcgcacccgttctggccgtgcggtgattaaccgtcgccgtgccaagggccgcaagtccctctccgcctgatcattccgatcagtgccacaggcatagtcgaggtggagaggcttcaaagccatcgtgatttcgtcaccgtgctgaaacgccggcgcaaagcaggtggcaaggatatcgtcgtacactatttggtgcccgacgaccatcatgatgatgacgaccggacggtgcatcgccgtttgggattagctgtctccaaatcggtaggacatgcggtcacccgtaatacggtgaagcgtaggtttcgtgtattggccagagcccatgaggatctgctgcccgcgcattgcgatatcgttttgcgcgccaagcccagtgcagcgaccgcatcgttcgcttcgctagatcagcagatcgcgaaggcttttgccacggtggcgcataaggtggctgaggcatgacagcttctttcaaggcggtgatgattggtggggtgcgctggtatcaacagcacatctcggcaaacacaccgccttgttgcaagtattatccaacgtgctcgaattatgccattgaggcattggaacggtatggcgcgttcaaagggggagtgctcgccgtgctgagattactgcgttgccggccgtggagtcgtgggggaatcgacgatgttccacaacggtattccgttttttacaggttttcgtggtcgaaggctcatgaagagcctcgactgacaccattggccacaacccaaagagaggcccaacgatgaactcaaatgaatttctgcttgatagcgggttttggggatttctatataaaatcctgactcccgttgagtggttgcagacctggatcatgaagatcgtgcatgacttcttcgtgatgctgggcgtgagcccgattggtgtctcatgggtgcttgccattatcatcctggtgctggtggtgcaggcttgtatcttcccgctgttctacaagcagatgaagtcgatgcgcaagatgcaggcattggcgccgaagatgcagcgtattcagaacaagtacaaaggtaagacggatcaggcttccagggaggccatgagccgtgaaaccatgaaactgtatcaagacaatgacgtcaatccggctggctcctgcttgcctatgctcattcagggcccggtgttcatgtccatgttctatacgctgtcggccattccatacattgccaacggtaaacgcgatgcgttgggcgcgttcgacgtagcaaccgccaagcaattcacccaaaccgatgtgttcggcattgtcagcgtgaccgataacttcaccagtgctgccgctagtggcaaggcggtcatcggtatcttcgtgttcctgatgtgtttctgcctgtggtttatgcagtacttcagcatgaagcgcaacatggcagctgcttcgatgaacaagcagaccgagaccatgcagaaggctatgctgtggctcttcccggtgatgtacatcttctccggtgtcgccatgccgttcgccgtgctggtctactggctgaccaacaacgtgtgcaacctctgccgcacattgtggcaggtgtacgcattcccgacccctggctctccggctgcggcggacaaggagaagcgcgatcatcgtaatgagaatgctcgccgcgcaaaggccggcctgccctctctggaagaagaagcattggccaaggccaaggaagaggccgagcgtaaggccactcagggctatcagcgtcaacagcccgtgcgtaagcgcaaaaagaagtgacgactatgtcggtgcgagttcgatgtttcacgtgaaacattcaacacgcaccgacattactttctctgttcgggggagcagggcttagacttggaattcaaacacgacatgaaggagtagcgtatggcacaggatgacgtgaagtcgatcgaccagctcaacgaagaggctgacatcgccgcggattaccttgaaggcctactggatatcgccgactatgagggcgacattgagatgggcgtgcgtaatgaccgccccaccgtgcaaatcgttgctgatgacgatactgacatcaaacatcttattggccgtaatggtgaagtcgttgatgctctgcagcaattgactcgtctggctgtacagcagaagaccggcgagcgttctcatctgattgtggatgtcgacggtttcctgaagcgcaagcgtcagcacctccgtgatatcgccttggatgccattgacgcagtgaaggattccggcgagccgtatgacttgaagccgatgaattccttcgaacgtaaagtcgttcacgatgtggttcgggaagaggggctgaagtctcgctcgcacggtgaggagcctcatcgttacgtgacggtgtatctcaagaatagagtcgaggataccgccgaagacgacgagcttgatcaggagtaattgctcggcgagtttttttgagatgacagggacgttcgacggatgtcgtctttgaacaaactaaagtgaccgcatggagaatggcgtcgtaatgagcggcgccattctccatgttgattgtttcacgtgaaacatggtgagggagatggctatgacggatcagctgcaggggtcacctgtacttgctgaggtcttgggtgatgcgttgccgaagttggagcgtttccatgccaagattgccgaagagggtgaacctcgtggattgatcggcccccgtgacgtcgatatcatttgggaacggcatattctgaattccgctgcgattgtgccgtacgttcggaatgcgacgaatggtattcgcttcaaaacagttgccgacgtcggcagtggtggtggttttcctggattggtggctgccgcgtgtttgccggatcatgacttcacgctgattgaaccgatggagcggcgaatcgaatggttgcatgaatgtgttggcctgatgcaactgcagaacgttgagattattcgtggacgctccgatgccgtcatccagcaggtacggaagcgggaaattcatccgttcgctgttgtcacgtgtcgtgcggttgctcctatgaccaaactctctggctggacgttgccgttgctgaaaccgtcaggacagttgatcgcactgaagggacggtctgctcaggctgaaatcgacaaggctggcaaggagattgcaaaattcggtggtcgtcgtccacgcgtcgttgaggcggctgtcggaccggatcttgagcctacccacgtggtgattgtggataagcgatgagtggagtactgattgagttatccacatttccatatgtgcgtaaaagttatccacatttttacgggacgatgtgcataatgatgaaaacattgatttttcaatgtttttcgtctgcgaatacacaatctaacactcaacgtcattcacacttatccacacttatccacattgcatatcgcaattgtggataacgagcatcatgtccatacgaatgagaacactggaacttacgtctgtgcaaggaggagcgatggccaccaaggatcatcagtcggaacctatagaatcggcttccgaaacgcttcagcgaatattcgatggtcacggttcagtgcttggtagccaaatggctgatgaaagctcacgctacgatgtactcaagaaaaccgatttcccaaagcctcaacggactcgtcgtatcgccgtggccaaccagaaggggggagtgggtaaaaccacatccacggtaaacaccgctgcggcgctggcgaacaagggcgcgcaggtgttggtcatcgatatggacccgcagggcaatgcctctacggcgttgggtgtatctcatgcatcgggagagccctcggtctatgacgttatcgaggggcgttccgatctgggtgatgttatcacggtctgtcctgattttcccacacttgatgttgtgcctgcatcaatcgatctcagcggtgctgagttggaagtggctgatctgcccaaccgaaacacgttgctgaaggaggccctagacctctacctacgtcaatcagataaacactatgattacgtgttcattgattgcccgcccagcttgggcctcttggtcatcaacgccatgtgtgcagtgaccgagatgctgattcctatccaggctgagtattacgcattggagggtcttggccagctgattaacacgattggtttggtgcaagagcatttcaatcccgtactgctggtgtccaccatgctcgtcacgatgttcgatcgccgaacgttattgagccgtgaagtatataacgaggttaagggacactatcccagcattgtgctgaataccaccatcccgcgttcagtcaagatctccgaagcgccgagtttctcccaatcggtgattgcctatgatcctcgtggcataggtgccatatcgtatggtgaagcagctttggaaatcgcacagcgttcgcaacaagtccttgacaccattgatgcgaggaggaacaagtaatggcatcaaaatcacgacttggtaagggccttggcgctttgttccccacattgccaggggaggagccggtggcggagcagcccgcaatgattgcggaggattcgtctactccggaggccactgctgacataacccccgccaagaaggctactgcccagcaggaatcaaaacctgccgtgcctcagacgatatcgtccagcaaggcagtcaagaaagccgccggtaaacgcgcatccatgcccgcattggacaccattactcatcctagcgacctgtttttcggtacggagaaacctcaaaccggtaaggtcgccgcacctcagcagggcggcaagtcgtctgcgtctcagacggcacatcgtacatccgtcactgtcaaagatgtttcacgtgaaacatctttgactgcatcggcggcaaagaccgctgacacagataagaaggacgagctcaagccggtagccggtggttatctggctgaactcaaactgtctgatatcgggcccaatgcacatcagcctcgtaccatcttcgacgaggatgagttgaatgagctgtctgcttccattaaggaagttggtgtgctgcaaccgatagtcgtgcgcaagcgtccggcaagccagattgctgcggccaaagccgccaagcacgacgagacggaatccagcacgaatccgtttgccggtcatttggacagcccgtatgagctcattatgggtgaacgccgttggcgtgcttctcagttggctgggttggagacgattcccgccatcgtcaaaaccactgcggatgatgatatgctccgcgatgcattgctggaaaacttgcaccgtgtggccttgaatccgctggaagaggcggctgcctaccagcagatgattgaagagttcgggttgacacaagtacaactgtccaagtcggtgtccaagtctcgcccgcaaatcgccaataccttgcgactgctgaacctgccggcttctgtgcaaaagagagtggctgccggtgtgctatcgtccggtcatgcgcgtgcgctattgggcctgagcgatccggaggaaatggacaagctggcttctcgtattattgcggaaggtctttctgtacgcagcaccgaagaaatcgtcgccatgaagattgcgtcgggggagcagccgaagaagcctaagacgtctaagaccaatccttgggttggttccgccatccagcagagtttggaaaatcatttcgataccaaggtgtcgattaagggcagcaccaagcatggtcgcatcgaaatcgtcttttcgtcaccagaggatatggatcgcatcctgcagctgctggtgccgagccaaggcgatgccgattccaaatgggtgtaacacgataagaacattcgtgttgtcgccggcattattgctgtgcagtgcgttgtatgcgcaagacgttatagcctctgcgtgattcctggcaggggcgtatgcccgcgctgtagcccctgtcgcaatagaaaacccctcaggctggagggacaatcacacatcgtgattctccgtcgataacgcccggtttgttgcgcactttggttgaagcctgaatgaagaggcatggcccgtcgtctgggtacgatttcagtcgccaaacaaaaccgctatggaaagaggcgacggaaccatgcagaatcagattctacaggtcgatgagaacatgctcgagacgagactcgaccggttggtgtcggagaaggtcgagcaattgctgaacgcggaggcggacgagatcacgggcgccgcccgctacgagcgcaccggggacaggaaggcctacagagtgggtcattacgagcgtgacctgaccgtgaaggccgtgaccgtgaccctcaaggtcccgaagctcaagggcgcgctgttcgagtcggcggtgatcgaacgatacaggcgtcgtgagcagagcgtcgaggaggcgctgatcgacatgtacctggccggcgtttcgacccgtcaggtcgacgacatcagccgcctgctgtggggcgagcggatgccctcgcagacgctctcggacaagctcaagggggtgtacgcgcagatcgacgaatggcgcaacaggccgttggagcgttcgtacccgtacctgttcgtggacggcgtgtggcacaagcgcacgtggggcgggtcggtcgagaacgtgagcgtgctggtcgcgatcggcgtggacgacacgggccatcgggaggtcgtcggggtcgcggagggcatgaaggaggacagggccagctgggagcagttcgtcaggagcctgatcgaacgcggtctcaggggcgtgcggctcgtggtgggcgaccggtgcgccgggctggtggccacggtgaactcgatgctgccggacgcgagataccagcggtgcacggtccacttcatgcgcaacgtgctctccagggtcagccgcaaacacgcggcatgggcggccggcgcgctcaaggccgtgttcgccatggaatcccgcgacgccgcgttgaggaaggcggaggatgtggccgcgcagatggaatcccgcggattgaaggccgccgcatcctgcctcagggagggcataggcgagtcgaccacctacctgctcgacgactaccccgtcgagcaccgtcggcggatccgcacgaacaacatgatcgaacgcctcaacagggagatccgccggcgtaccagggtcgtcggcagcttcctcgacggcaggagcgcgctcatgctcgtctgcgccaggatccgatacgtcaccgccaacgattggtcgagccgccgctacctgaacatgtcccgactcggtgacaccatgcagacaaccgactgaaaccgacccggcaacgggccagaccgcttttgcgcaagacttcgggcacaaccagaccgtaccttcggccatatggatctgaattacttcagctttgcagccgaagtgcgtctcacaatggggaacaactatcgtgatttgtgaggaaggtccgccagatcatgtatatgcgtatggcccgtacttgtagcacgggccatacttttcgttccatggctgtggtgtagaaattgattattccttgaccgcgcccgcggagaggccggactgccagtacttctgcaggcataggaacgcgatgaccaaggggatgatcgtgatcaacgagcccgtgatcaccaggttctggatcgcctggccgccagcggtgctcgcctggtccttccactggttcaaaccgatcgtgagcggataccagttcgaatccttcagcatgatcaacggcaggaagtagttgttccacgtcgccacgatcgtgaacagggccgtcgtaacgatgcccggagccaacagcggcagggacacctggaagaacgtgcggaactccgaagctccatcaactcgtgcggcttcaagcaattccgtcggaaccgcctgctcggagaagatccacatcagatacaaaccgaacgggctgatcagcgacgggatgatcatggcccacggggtgttcgtcaggcccaatttggcgaacaggaggaactgggggaccgccaaagcgatgcccggcacgctgatcgcgccgatgatgaccgcgaacaccgctttgcgccccgggaagcggaacttggccagagcgtagccgcccatgatggccagcagggtcgcgccgccggcgccgaccaccacgtacaggagcgtgttgagcagccagcgcgcgaagatcccgtcctggtatgtgaacacggtcgcgatgttgtcgaacagggcgaacgtcttgccgaaccccaggccgaacgtactggtgaagtcggcctgtgtcttcgtcgcgttgatcaaaaggtagacgaacgggaacaggcagtacacggcgaagaccgcgcacaggacggtcaacaacgtggaacgcctcgggttgttcacgttcgcgaacccggccttcgcgctgcgcctgcgttcggcggcctcgtcggcggcgatcctcttctggcgggccttctccgccttcctggcggccttctcctgggccttgagctcggcgtcggtcaggcgaccggcggccgaagtcgttgctgcactcatcacatacgctccttcacgatcatcatcgattcctcaacacgaacagcagtagtcgtcgtcacttcatctgctccttgaggctgttgagctggacgatgtaggcgatggccatggtgatcacggccatcatgatcgccaacgcggccgcgtagttcgactggttgccggagaagctcaggttgtacgcgtacatgttcggcgtgtaatacgtcgtgatcgcattaccaggaaccatgttctgcaaaatgctcggctcgttgaacagctggaacgagccgatgatgctgaagatcaccgtgatagccaggctgccgcgcaattcgggaagcttgatgctcttcacgatctgccactccgacgcgccgtcgatgctggccgcctcgtacagggaatgcgggatggtcgacagcgagctgtagaagatgagcatgttgtagcccgtgaactcccacgtcacgatgttcccgatactggccaacaacacgctgggggcgagcacgtcgatgtccgtgcccaggaaatcgttcaacgaacccaccaggccgtacttcgcgccatacacgaaaccccagatcaacgtcgacaccaccgccggcaccgcgtacggcaggaacgtggtgatgcggaagaacttcgtgccatgcagcttcatggaatccaacgccagggccatcaaagccgacaggaacagcatgatcggcacctgcacgcacgtgaacagggccacacgaccaacactgctccagaactggccatcacccaacaggcgcgcgtagttctcgaagccgacgaacttggtgccgccgatcatctgcttcttgaagaacgaaatataaacggcgtacacgatcggcacgatgaacacgaacacgaacaccaccgcaaaaggccacataaacttccaaccacgccaatccgccttgtgtttattgacacgcacggttgccgaatgcagtggcatattggcaacaacttccgtcgctgacatcattctctccttcgagacattttttgattgtttttgattgccgcgcaaagatttccgagtgtgaaacaggtgtggatgggaaagcatccctttcgcgcctgtactttcactccacggtggagccttgatgaatcgcaccctgatcgttggactgaagaaattcagatttcgatgatcgggcggtacggttcatgccttcgaggacacctgatggtattctttttcctttctttctattgaacggcagtggcatgatccttgcttttggcgcccttgcctgtagtctgcatcttaaaaccgaaggattatgactgacaaataatttcgatgatttcgacgatttcaataatcaaggcactcaccagaacaggcgcgcgcgactgtatcgtgtgagggcctacgaagttgatggttcagcgcatgatagctgaaccgccggggttgcaatttggcacatattccaggcaatttgttgatggaaatatatagcagagctgttattggcgacatcgctgttgatttacgttataggtttaatgggccgggagtcattgcatatctccgtaacctgtgcccctccatgggttttgtatgcgccgcttgaggggccattgtcggtggcggtgcggctgctaccgttggtctcagtggagtattcgctaatgtgactttctcgttctttagacaatggatcatcaattgtgttggccgttgcgtgatgcagccgcgcatgtctgttatggtgagtgccttgattattgaaatcgtcgaaatcatcgaaattatttgtcagtcataatccttcggttttaagatgcagactacaagcaagggcgccaaaagcaaggtcatgccactgctgctcaatagaaagaaagggaaacaatgaggttctcgttaggaaaaataattgctctctgcggtgctgcggcgatggttgttccattggcagcgtgtggaacaactcagtcggaaactcccgatgggagcggtaagacggttgttaatgtttgggcttgggataacaatcttaaagctaatgctaaggttttcatgaagaaattatatatgtctttttgactatctttttatatcctcttaaatgtccgcaaagccttattttataggctctacgggcatttttcttttgtggtaaacctcacatatctaggtctatcttcttatattttccctgtcaatcgtggttaaaatcgtggtaaatacttctatgcgattagacgctgaacctctgattttgcggtatctatggacgcatgagcgtaccagttcattgtgatattgatatttgaatgtcccatgatatactgtaaatcttttgggttcatgttcttgcttgccagtcttgtacagaacgtatggcgtagcgtatgcggtgtgatatgtggtaagggattgtccttgtgttgcttgttgtatttctttaccatacggacaaataaggcgttgtaatcaatcgcaacttttggcttgcctttctgattgacaaataggaaattgctctgtccgtctatcacaaatggttctgcctttgggcgtttcttcataacccgttgaaatgcctgtattgtttctctgcttaatggcacttgccttattccacttttcgtcttaggcgtttcaatgtaatagccttgttccttgctctttagtaactggtggtcgataatcacaacttcattcttgaaatcaatgtcggctactgtcagtccgcacagttccgagatacgaagtcctgtttttaacagtatcagcacatcatcataatgcttgtgatacacattgtccgtcttaataaatgacaataaggtttgttcctgttcctctgtcaatgcgactttctctttggtatcattttctaggacttcatttaacttgaaatcaaaagggttcttccttacgcaatcgtcttgtatagcgatatagaatgacgcttttaacgagcgtttatggttgttaatggtattgtaggaaaagcctttgtctttcatgcgtaacgcccattccttagcgtcagagggcttgattgtatcaatgctcctagcacctaatttatcctcttttaataaccgcatgagttgttcccgttgtttcattgtgcttttcttcacatttgccctctgtgcgttctgtttggcatagagttggcaaagcgtcattttcttgcctgtgctgtcgataccgtcctcaatatcccgtcttatctgctgttccagttctcgaagtgagggtttttcccgttttccttttggtgtcgggtctgtgggtgtcaatctccaagcatacacatattttgtgtttccaaatgcgtctacatatttatataagtatttcccgtctgttcgttggctctctccagtatgcaggatacgacctttgttatcccgtcttttttctttcatggtgtctgctcctttccttgttggaaagagccttgatatgacttgtgttcatcataacacatacaaggctcatttgcattagattgcgtccaatttatcaataacctgttcaaactgtcggcgtttaatctgtatgcggttgccattcataatgagccagccagcgtccttgttttcctctgccaatcgtcttaacttgttttctccgatacggaaatactttgacgcttcttcaatggtaagggtgtatttttcccatacgggaatatcgttgttattcatcagataccccctttcccatgtttcgtgtcatactggatataggggataaggtcggtgcggtttattctctgtaaatgggcggttaatttactggaaagggaattgctgtatcttgccttatcaagcatagttcccactttttccagtccacctaatgcgtcatgttcttccaagaagtaaaaacttttgacagcggaaatcacgccaccctctgtgagccattgctgtgtttcttcaagggaattttgctgttttggtacttgcagtttcaagacttccacagcccctaaaaagcgttcccaaaaccgacaagttttccacctgctcttattactttcgtttctgtttggtacgacaaagcgtaggttgtttgccaatagcccgaaagccagttctccaagttccagcggtctttccttgaatgtcatggcaaaagcatgagccttatcatcacgcagttgcatttctgtccgtttccaactgccgacttcatcaagcgtcttattatgttttgaacagacttccttatctttatcataaaagcggtaggacaatcccgattttccagcaccgatataagcagtctttgcggtgtcgaaatcatcaaacttgctttcgtcaaagtggtagccctcactattcgagataaattcctctttttcgcatttcttctttatctgctctatggtaaagaatggcttttcgttcttatcatcaatggcaatatcaagtcttgtgaaatgaaagttatctagtccgtatcttcgctcacagcgtcggaacatatccccaaaggtataattcctactgtcgagaatacggaaaatatcatcacaacctctgccagtcataacaagataacagcctaacccttgtgggttatcatctgtttttcttgcgtcccccgatacataaatatctccaatctgccagcgtgcttgataggttttgtatttaatgcttgccggatagacattgaaaatatcagtcggtaaacctaaaatgtgcatgatgacatcttcagcggttgcagtatcaaatacaatactgatgtaatcaatcttaacggataaatttttgtgtgtagttatagtgcattactcctttcgtacttcccgtttttttgcggggtaaaaatcgtgttttttcctttatttatcacagtttctaggtactatgacatgtatgcgcagggcggtgttacatatacgccctctgcgaacgccgaaaggcgttccctttccaaaaggaactgtctgtccgctccacgtctgggggacgtgtcccgtccagccagccccttttggaaaccatgattttcggtctgatagtccatgcctgttcatgctgtcaaagcgaaaacaactcatctatatgcttactcaagtgtgtgattgaccctagcgtgcttaatcacttcatttgatacgataataacgccagcaggattacttgtcaagaagtttttcttgacttttcaaaataaaataagtatgataggcttataaacagaaagaaaagcaacgaaaggagcggttatactaagttatggagggttatataaagaaaatgattttcttaggagagaacatacagaccataagaaaacacaggaaaatgaaacagcaggagcttgcggacaaaatcggtatcaatatgcagagcctttccaagattgaaagaggggtaaactatcctacctttgatacgctggaaaagataatggacgtgctgggagtaacgcccaatgaattattgtcgggaaaatggaagtatgttaatcaagccgaaaaggaagtctgccagtttttaaggacggaagaacgcctaaatgcagagttgaaacatggacactatgataacttctttgacagcgaagaagaatggctggagtatgagctggaacagttgcggaaatacatcacagactatatcaacgcaacggacatacaagcgtccgacctttaccctatcaaggaatttatccagcacttgaaatttcagaaaatattaaaccgctatgatgatttatacagcatggatatgtttggggaaagcacagacggacacaagtacggtacgccttatcaggttgtaaaaatgataaaccccaattcaaaagaagatatggaactgttacgggaagtattaaggaataatcattttgataatgaggacgagtagccttttttcttttctgtgttgggtaatcaagaggaagaaagaagtgtgcattttcaaggcagaaaaatatcaaagggtatgctgatttttgttgtggcggatatatggaactgttataatatggatatgaagaaagcgaattggaatttgtggaggaaagataaaatggatagacctattacaacattgtttatgctaatgtctgttgatgggaaaataagtactggtgcaacagatgatttggatgtagataaggattttcctaaaattaaaggcgttaatgagggattacaccaatattacgaaatagagcagacaacagatttgtggtctttcaactcgggtagagtgcaagaaaaaatgggagtaaataaaaagaaaataccaaggaaaacaccggtttcctttgttgtaattgataataaacatttgaatgaaaatggtattcgctatttttgtgctttatcaaaagagtttgtgctgattacgacgaatacaagacatcctgcctttaacgtagaggatgaaaatcttcatatcatataccaaaatgaattatccttaaaagatgcacttataaaacttaaatcggaatatggttgtgagagaataacaatccagactggaggaacattgaataacttatttcttcgtgaaaagctgtttgattatgtagatattattattgcacctgttttgattggcggcaaggatacttctactctaattgatggaaagtctttgacagaagaatgcgaattatcaaaattgggtgttgtgaagttgcaagaatgtgtagttttggagaactcgtatcttagattacgctatgaggtgattcattgacaaatcccagtttatataactgggatagatttgcagttgtggaggtggttgattatggaatatactaaaaagaaaaattggataatagcaatcgctgttgctatcgtttatttaacaataagtattctctttgatttgtggtttttttcttggattatatgggttgcctatgcaatttatagatttatcgtgaaatagataaatccaagctgttcagaagtacaaatctcagtttgacaatttcatatccgtacataaaaagacaccgcttaagttaagggtgtctttttagcgctattttattgtcatatcaaggctcaatcaatcgtggtaaattcgtggtaaaatgaatgattttctatacttcaaaatacttgaaaacatagtatttatgtggataatctaaaaatagatataaaatttattattaaaaaccctaacattgtcatcaaatttaccaatgccggtagtggtaaagatgaatacaaagctctgaataatgctttggaagctggcagtggaattccggatatagccatgattgaatattatgcgattcctgagtatgtaattaagggctctcttaaaaatctgaatgactatgggactgccaaatataaggatttctacaccccaggtacttggaatgcagtgaatttcaatggcggtatgtatggtatgccagtcgactctggaccaatggctttttactatgacaaagaggtatttgacaaagctggcatttctgagccgccaagtacttgggatgagttctatcaagatgcaaagaagattaagcagattggttcatatattactaatgatccagggaacgccggattcttcaatgcaatggtctggcaagcaggtggacacccatattccacatctaaagacggcaccaaggttaccgtcaaactcactactgataaaggagtgcagaaattctgtgacttctggcaaaagatgattgatgaaggactaatcgaaacgaagacaaaagatagttctgatgattggtatcgttcagttggttccggagaatttgcgagcgtgatatctgctgcatgggctcccggcatgtttttaaacaatgcttcggagggtgctggaaagtggcgaattgctcaaatgccaacgtggaacgccggcgagaaggtaagttctgagtacggcggctcctcccttgccctgatgtcgtcatccaagaatgcggatgctgcgtacaagtttatggaatttgccagcactaattctgatgccatcatgtcccgtgtggaccaaggtggttttcctgctgatttgaagaccatgtctaacgataaattccttagccagactactatggtgaactccgatggagacacggtggattattttggcggtgagaagttcaatgctgaattcgccgaggctgcgaagcgtgtcacatctaagttcgaatttctgccctatgacgtttatgcgcgaagcgttttcaccgacactgtcggggcggcttacacgggacagaccacaatgaaggaaggtgtgaaggcttggcaggacaagctcgttgagcaaggaaagagccaaggctttactgtgaacgaataaggataacaatggctggaatcaaggacgtggcggctctcgcaggagtttccataagcacggtttcctatgtgatgacagggaaacgtcccataggggcaaatacccgtcggagagtattgcaagctgcgcgggaacttggttacttggcgaaaaacggtggtccagctccgttgagtggtgagactcatttcgtcgcgctgagttcgcccgtccatgattccaccagctataccaactattgtgcttattttctaaattttctcaaagcggccaggcgacttggctatgaaacgttgctgttgactgaggaaacaggagatgagcagcttcgctctatcatcgatactgggatggtggatggtgtcgctcttatggatgtgactatgaatgatccccggattgaattggctcagctttcaagtattccgctcatttctattggacatcctatgaatgaaataaatgtgccatgcattgataccgattttattgaaatgggtgaaatgatcatgcaaacgctttgtcgtaatgggcacagcagaattctgtttgcaggggggaaggagattgattacgaacgaaatggaggtgcaaattacctcattcggctcaggtcatcaatgcatgatgctgctgcgcgatacaagattcatatagatgaagagtttaccgacgaggatgatttcgatgctgccgaaaacctacttgagaggttcatctcgagtgagaacacagcaattgtgactcaaggcggcccattgttccttaataaccttgttgctgcgacgcggcagcgtggaatgaagattcctcaagatctttcgctgatttcagcgggaacatatacagattccataggcaagcgtctgaggatagatgaatttcccttaatgccagcagagttgtgtcaactgggcatgagcatgcttgttcggctcatggatggaactctaaagggaaaggaaaaagcaacattgattcatcccgtatataggcaacgtggatccatagcatcgcgttgatgaagaacttgatttaataaggaaacaagatatgactgatttcaatcgttccgtccttcccgtcgccgtgcgttccaacggcgcgaccccgaacccatggtgggccaacgcggtggtctaccagatctacccgcgttccttccaggacacgaacggcgacggcatcggtgacctgaagggcatcaccagccgtctcgattatttggctgatcttggcgtggacgtgctgtggctgtccccggtctacaggtccccgcaggacgacaacggctacgacatctccgactaccaggacatcgacccgctgttcggcacgctcgacgacatggacgagctgctcgccgaggcgcacaggcgcggtctgaagatcgtgatggatctggtggtcaaccacacgtccgacgagcatgcctggttccaggcctcccgggacaaggacgaccctcacgccgactggtattggtggcgtccggccaggccgggccacgagccgggcaccccgggcgccgagccgaaccggtggggttcgtatttcggcggttccgcttggcagtacgatccgaagcgcggcgaatactacctccaccagttctccaggaagcagccggatctcaactgggagaatccggaggtgcgcaaggccgtgtacaggatgatgaactggtggatggaccgtggcatcgacggcttccgcatggacgtgatcaccttgatctcgaaacatctcgatagccacggacggctgcccggagaggtcgactcggaactgtccgaaggagagataggcgaagagggatacacggacgcgagcccgttctgttccgacggtccgcggctcgacgagttcctcgccgaaatgcgccgtgaggtgttcgagggccgtgagggctacatgaacgtcggcgaggcgccgggcatcactccggaacgcaacgagttcattaccgatccggcccacaaggaactcgacatgctgttcctgttcgaccacgtgggcgtcgaccaggaaggttccaagtggaacaccgtgccgttcgaagtcaggaatctgcgtgctcgtcttgccgaccagcaggaggccgtgaggaacgccggctgggccagcctgttcttctgcaaccacgaccagccgcgtgtcgtgtcccgttggggcgacgactctgaccgcgagtcgcgcgagttgagcgccaaggcgttcggcatgctgctgcacatgcaccgtggcaccccctacatttatgagggcgaggagctgggcatgaccaacgcccatttcaccaagctcgaccagtaccgcgatctggaggccatcaacgcctaccgccagcgcgtggaggaggccaggtgccagtcgccggaatcgatgatggcggccctcgcgctcatcggacgggacaattcgcgcacgccgatgcagtgggacgcttccaggtacgccggcttcaccgcggccgacgcggcgacggaaccgtggatcggcgtgaatccgaaccatgtggagatcaacgcggccgaggagttcgacgatcctgattccgtgtacggcttctacaagaagctcatcgccatgcgccacggcaacgcgaccgtcgcgacgggcgagtggaatctggtcgcggcagacagcgagcaggtgtattcgttcacccgtaccggcggcgacgatacgattctcgtcatggtcaatctcaccggtaggacggcgcgggtgccggcggaggtcgcgcgattgctcgggaatggcgtgggcgagtcgcaggtgctgctcagcacctatgatgccgtacatggcgtgaagtcgatcgctcgcggcgagcttgctcgttgggagggagtcgtgattcagctctaatcgactcaagctgacttcatgttcacgctcgaccttaccctggttgagtgtggacatgaagtcaatgtcaggggcgtgtctatctcccagagtggcgtctcttaatggggaagtcgatgtccgtcaaatgtgaactggagaacactggctggtgcagggccatctaatttacttagctactaacttaacggcaaatcttaaaaggtgcagcctcgcatgattctggtgagaggtttttcgttgttccgtgctgcggataagcgtcatgttgttgtttgacgttcaattgtcatatgggtcgtgagactttccgcgccgaaagtggttccgagacgttatggctacgtagatggtacgtaggctcttctatggcaaaaagcgcactgaagcgcaacgccgcgaggatcgaacaggatgggcgttcatggcaccattcggcatactgttcgccatcgtattcatcatcccgtgttgcgtttcgccattcggcttcttcctgggtcgcgtatacgcgcaaacctccgtgccgaacgaactgctggaacattctggacgtttttggcctgtcagcgggaggattcctccactcgctggaagaattggatgctaattgaggaatatggctgtgaatgagtcggaaggtttgaatatggaacagtctcgggagcggtttgcgaatgaggtggacgttgcgttagcgcagtcggcccgtccgtttgcgattcacaatgcgcgcaaagtcgatgcgcgaggtgttgcggaacattattggctggtttccgatggtagtgcgattattgcgactgggaatcgggacgatgattttgctgcggcatgcgcaagcgtcggtttggatgccgatgctgattccgattcggtcagttcggttggttccggcgattccatgaccggttcggccggtttcgtgaccaacgctgcaggccgcatgatgactcccggttacgtcgacattcatgcgcacggttcgtgggggagttccttcgatgatggtgtgcaaggcatacgcatggctcgcgcaggtcatatgatgcacggcaccacccgtcaggtgctcagtttgatcaccaacccgcttgacgtgatgtgcgccaatcttcaaaccgtgcgtggcatgatgggtgctcgccctgacattcttggagcgcatttggagggtccgttccttgcgttgtctcgcaaaggtgcgcatgatccggaatgcttgaaagatccggttcccgaatatgttgatcggcttttgcatgctgcgaacggctgtttgcgacagatcaccatcgcccccgaactaccgcatggcattgatgcgattcgtcgttttgctgcggctggagtggttcctgcggtgggacattgcgatgccgattatgcaaccgcctgcagaggttttgatgcgggtgctggcattatgacgcacatgttcaatgcgatgaatggtttgcatcatcgtgagcctggtccgattccggctgctgttgaggatccgcgcgtcactgttgagttgattaatgatggttttcatgtgcaggatccgatggtgcgtttgggattcggcttcgctccgcatcgcattgcgtttgtgaccgacgctatggctgccaccgattgcccggatggtcattatttgctgggtgcgttggatgtgaatgtgattgacggtcatgctcgtcttgcatcgaatggtgcgatagccggttccacgttgacgttggaaaaggctgttcagcgtgcggtactcgaattaggattcacgcctaccgacgcggtggaagccgccacgttgattccggccaaagcattcggtttcgatcgtgcgaacccggtcaccaagcagccgctcggtctgcttgcccccggctacgctgccgacgtgcttctgatcaaccccgccatctgggccgtcgaacacgtctggtgcgacgcccaccttcttcgttaaggcgcgattgctgaaacgtaattgcaggaccggcttcgtaacaggatgccggtccttgctgtatctcgagtttttgttttcagtcttgcggggtgaagctgtcgcgggcgacgagagataacgcccggtttttgcgcactttgtgattcgggcttcccggatatgaacatggcccgcaccgggtacgattttcagtcgctaacacaggaaaaccgcgattggaaagaggcgcgggccatgtccaaggaaatcatacagttcgaccaggccatgttcgagaccaagctcgacgccatggtgcgcgacaaggtcgagcagatcgtcaacgcgatgctcgacgaggaggccgacctaatcgccaacgccgccagatacgagagaagcgatggacgcaaggcgtaccgggccggccactacgcgcgcaggttcaccgtcaaggccggcaggctcggactcaaggtgcccaagctgaagggcgccctgttcgagtcggcggtgatcgaacgctaccggcgtcgcgagcagagcgtcgaggaggcgctgatcgacatgtacctggccggcgtcagcacgcgtcaggtcgacgacatcagccgcctgctgtggggcgagcggatgccctcgcagacgctctccgacaagctcaggaaggtgtacgaccagatcgacgaatggcgcaaccggccgcttgggggcgagtacccgtgcgtgttcatggacggtgtgtggcacaagcgctcatggggcgggtcggtcgagaacgtgagcgtgctggtcgccatcggcgtggacgacacgggccaccgggaggtcatcggcgtggccgagggcatgaaggaggacaaggccagctgggagcagttcatacggtccatgatcgagcgcggcctgaagggcgtcaggctcgtggtcggcgacaggtgcgccgggctcgtcgccaccgtcggcgagatgctgccgcaggccagataccagcggtgcatggtccacttcatgcgcaacgtgctctccaaggtgccgcccacccaccgcgaatgggcgtccgccgcgctcaaggcgatcttcgccatggaatcacgcgcgtccgccctcgccaaggccgaggaggtcgcccgcgagatggagtccaggagactgaaagcggcggcctcctgcctgagggaaggtatcggcgagaccacgacctatctgctcgacgagtatcccccggagcaccggcggcggatccgcacgaacaacatgatcgaacgattgaaccgggagatccgccgccgcacccgcgtcgtcggcagcttcccggatggcaggagcacgctcatgctcatctgcgccaggatccgctacgtcaccgccaacgattggtcgagccgccgctacctggacatgtcccgactcggtgacaccatgcaatcaaccgactgaagtcattcccccgacgacggaccaggccacatttgcgcaaaacatcgggcacaacctctccgcgcctgaggggtctttctatgcctttgaccgatacgtactatccaagggcggcatgctgtaacactgacctagcgttgctcctatgtcacaggcagcagccagaacagcaagccaccatcagtccgccaccatcagtccgtaagataggcctgcgtatccagcgctgcacggcagcccatgcccgctgcgctgatcgcttgacgataagtacgatccacgcaatcgcctgcagcaaagatgcctggcgcactggtcaccgtgctggcaccctgcaccacgacatatccatcatcgtcacggtccacaacaccggccgcaaaatcagtggctggcgtatgaccgatagccacgaatacggcgttggtgtccagcgtgctttcttctccggtcaccacattacgtacggcgatgctgctgacactggccggtgctacagccggtcgtttgagcgtcaagccaggaatggcaataggtgcaccggtgttctgtgtgggggaggaggtgccggtaatggaggtcaccactgtgttggtcatcagagtgatggtcggattggctttggctcggtccaccatgatctgcgaggcgcggaagctatcgcgtcggtgaatcaaggtgaccgaagaaccgaaccgggtcaggaataatgcctcttcaaaagccgaatcgccaccgcctacgaccacgataggcttgttcctgaagaagaagccatcgcaggtggcgcagtacgagacgccatgtccggacagctcctgttcgccgggcaccccaagcttacggaatgacgaccctgtggcgatgataagcgacgatgcctccaattgggagtcatcggagagtgttacacgataagtcggcttgaccgaatcactctcacacgcctcgatggaagagacatcgtctgcgatataggttgtaccgaagcgcttggcctgttccttcatgcgatccataagatccgggccaagaataccttccgggaatccggggaagttctccacctcagtggtgttgaccaactgtccacctggcgacaacgcaccagtgaccataacaggattgagacctgcgcggccaagatagatggcggccgtgtagccagcgggaccagaaccgataatgatgacgttatgtttcacgtgaaacattgtcacacccccatacgatattccgtgtcattcagccagatgcgaagaaggggcggtaccgtcgaatgtatgcgaacggtaccgccccttcttgggtcagttatcggcatagatgccgattagaagacctccaccttttcgatgtacagctggttctgcggcaggctatccgatggcacccacagcagcagatcctgcgtcttgacggctttggtgaacttcacctcagtagtgccaccttcagcaaaggtgaattcggccacctgcttgccttgagtggggtccccagtggtatttgcgcgaatatagcccttaccaccggatgtgcggatggtgataaccatgcggtacgcatcctgcggctggtcaaggtgcatgtagtatgcgtacccggattggccgccaggattcgacaggaagttggcgctggaaatcgtaaacgccgtgttgttctcatggctcggttgcggaacagcgctggaatccttatcgccggacttcttggccttggtcttcttggacgacgaatcagcagtctcggacttcttggacttgtctgatgccgagtccttggattcgctctgagtggcatcactcgattttgaagaatcgtcagtggtgccaccgttcgtcgcgttctcgctgccaccaaatggcacagcgtcagcattgatatcaggccagtcaccttcactggagttgctggaagcatcggcaggattgtctccggaggatcggaacgcatgcactgcccaaacagccgctgccactaccaatatcagagccacaatgatggcaacgaccttggtcgacagtttgccgaacagatgttcatcgggcagcttgctgtcaacctcgtcatccggcacatccttcggtgtgaagctcggaggaatggcgcttacttcggcaatgcgggcctgctcctcttccaaggcacgcagtgattcctcaccgggagccacagcacggccgctggcgtcgaacacgggaatacgactggttgtctctcccgcggtggcatcggaaataccgccggtaacaataggcactgtcaaccgagtattatcacccggaccgccgataggggccggattcatttcgctgtaccagtcaccggtgccttcaccggaaagattttcgtgctcccaggcgtcagaaaggttgaagtcaaacagacggcgggcatcagactgagactggttgccgtcagcagtactggacccatcaggcagaggaaccggtgacatcgcgtgcggagcggggacggcggccggctgaaccggcagggaaggggtaatagacaattccggaagactgttgctgttaatcaacgtgctgggaataggcacgatatcagtctcgttggcaggcttcagtatcgccttggtaatcgagcaatcgctttccacgctcggcaaagcaatatcagcatcgctcagttcagagagcggcttccaattacccaacaaggcgtcgagttctacaagggctgccattggcaacgtatgctcgtcgggctcgctcaaggccaatccacgcttgcaaatcacgcggaattcgccaggggtgtcttgcggcaaggcacgcagattgaatgtgggtgtcgcttggcttggcgtgcgtgtcagcagggtatagagtaatgccgcaagctggcgaatcgcataccgttcaggaccgtccgtacgcagatcggtagcggacgtatcggccagcatcgtggcacatggtgcatcggcaatttgcacaccggaggtagtcactcgaacggtgtcggttgtgatgacgatgccgctgggagtatccgcaatgacctcgcgcagcacgttggcgcattctccgataatcgaccggatggcgctgtagctgagcggcttggcggtatccaccatgtagtcagtcaggcattggccgctatccaccggcatgacaatgagaagtacgtcggattccatacggtatttcagtacgggaatcacacgatcagggcgagtggcggccatgcgaccagcgagctcatcgattgcggcgaaagcgctgcgattggtaatgatgaacagctggcaatcctttgccagcacacggtcgttggctttccatgcctgaatgccaggctcctcacgcaacgatgacaccaaggtgtatcggttgagaatcgtgtctccgagttgcggtttcatagtgcgttcggctccgtgtgattggtgttcgagactggtcttagatattctacgtgcggggctatccttgacgggctccgtctcaggattgatttgcgtatcgtcgacttttttccggctgggctgtcacagcaacgtcctcactggccggagtcttgtgtagacgggccagtatcgagtgataggcgctgatgagttccggggtgtgcaccacccacaacacagccacatatactacggccagcacaatggtgagcaccacgcagatggccagcgcagaccaccagctcatgtgcccgcctactggtcgaatatccgcgccgaacagtgcgactaccggtcgtttgatcagccagaccacaactccggaagccagtgccgccacaatggccttggcatatgtcctcgtgatctcccgaccgccaagattgccttcgaacttgcggcgcaacatcatcaacgtcagcggcaacgccagtaatccaccgagggtcaccgagcaggcgatgccgagtacccaatgctcaggaggaagtaccatcatgccgatgatcatgaatattgaggtgaatccatactgcatcaccgcggacaggaaggggtgaaggccgtcctcaaaggcgtagaacgtgcgctggattaacaggaacgccgaccccaatggaatgcccacagacaaggcgataagcgcataggagatcaacatagtctcgtccatcgagacggacggaagcaatgcgcggatgatcggttcggggaacacgaccatggcggcggcgaagaacatgatgagcaggcccacattattcagtgcgctgaccaggtcgtgccgtgcctcatccagattcgcagctgcgatggaacgggagattttggggaacatagccgtggataccgatacggcgatgagcgaatagggcaggatgaacagtgtgtacgcattctgataggtcgcgttgcctgccacgctgaacaggctggcacccgtcagttcgtgggcgcgctgcggtgcggatgtggcgatacgggtaaggataatgccgcagatctcactggtgatcaccacgcccaaagagcctaacgccacgggacccatagacctgagtccaaagccgccaagcccgaagctgggtttgtacttgaacccgatacgggccagcggcaggaacagtatcagcgcttggaaggccacgcccaaagtccaggtgcctgcggtaagcgcgattttgtcggcggtccagaattcgaggggctgttcattggccttgctgaacagcagaataaagccagtaaaaccggcgcaactaataatgttggcaccggttgagctccacgcatacgtgaggaaatggtctttggcggccaggatctgccccaataccgtatacaggccgtagaagaacacctgaggcatgcaccacagggtgaacgaggtggtcagggctatcatctggtgatcgtcgctacccacgtacaggcgggcaagcagagggctggccgccgccatcaccacggtcatggccaataggatgccgatggccaacgtaatcaggcgattcagtcgttcttgggcgtctttttctttcaacgtgcgcacgatctggggcaccagcacggcgttgaagatgccgccggacaccagcgtgaacacggattggggaatcatggaaccggcctgataggcgttggccgccaatccggtggtgccgatggccgcagcgagaagaatcgtgcggagctgaccggtcacacgggaagcagcggttcccgtggccatgatcagggaattacgacctacgcttgaactcattcgtcggggtccttcttccgatggaactgccgccacaggccgataatgcccagtagcacggcgaagccgatgataatgaagccgctggcatcactgatgcgcatcacactggtgatcgcggtgtcctgcgtgttgccgaagctgttgccttcccggtcggtcaacgacacatgggccgtcgatgagccggaagtggaaacgcggatggtgaaggtcacctgagcgtcgctatgcgagggaatatcgatgtcagcggttcgcgaggtgacgatctgcatggagtcagtcagtgagttgacctgcacgctgacggcgtagggaaggtcattgctgacggtgattggcattttcgcggattcgctgaacacggatattgattccgatgggttgatgcgtacgccgttcagaagatcgctggccagtgttttcgtggctttgaccatggcttttcgcgtggctgtcggctggggggagccagacatggaccgcagcgccatatcgtcatgcagcgccagtaaagagccaatccattgcgtcggatcgttgctatgcgaggcggtgtcattggcgtcctgccgggccagggcctgcgggtccaacgacgagacctcgtcggaatcaatctcgttcctcaatatggaggtggccatgcgcatgatgtcatgccggctgtcggccaactgtctcaatgccgaccgggtattggcggtgttggcatcatcggccttgtcgggattgaccgaatcgctgacattgtacggatcggccttggccatggtcttcaggtccgtcagattcaaccaagacgcctgctcgaaggcgctcatcacctgatcgatccagctggcctccgtggtgcgggagaacgtcataagcaggtatcgggatgtatagggctgttccatctggtagaacgcgctctgagcgatcagtcgggccaaccgaccggcatcgctggactcggcctgcgcgtccgtgctggtggcttggcccttggccagcgtgcccaaggtcgattgctccttcagcacggtgacatcgccggcaggcgtatgcaccacgtaggtgcctgtgtgtacggcttcagtctggtcggcatcgaaagaggcatcggcaatcaccgtgtcatagccctgctcgcgtgctgcggtcagcgcatccaacgtccaacagttgttgccctgccatgcgtacgcggagggtgtttcggagtcgcctccgtcggcataccatgcggccgcctgcttggcgttccactgctcagtggtgatgccggccttttcgtaggccgcggtatcgtccagtgcggtataggcggtgatgtcgaagtcggcgggctgcatgatgccggcaatggacggttgcactgcggactgacgccaatacagaggatccgcgatcacttgcagcgagcggtgcttggcgaatgtctgcccaagggatcgcgcggtatcggcatcctgttcggataaggatatggcttgcgtatcagtggctttggccgcgttgctggcgtcggcgttatcggacttgtcggccttgtccgtgctgttggacttggacgatgttgatgtcgaggaagtggtggtttcggcaatgcgattgctgatggccttattatcgacctgccagccgctggcggtgtagggcatggccacggtcaggttcatggccggtgttgtcgcggtgttgagcccatccgaagatcgggtcagaaaactcggcaaatcggcgagtatctgattgccaacgatatacgacagcatcagcggtttcggtccccaactccctatggaggcaagggtctgctgattggcgttcacctcgatggtgacggtggcagtgccgccggcgggaatcgatggcacgtcaacggaacccaactcgttgggggttgggatgggggcgttgttctcggcccaattctgaatatcggtgcgcgagacaaaggtgaacaacgcattggtggtcaggtgcagtgtgccgcttgacgtggccgtgctgtccgtattgctgatgaccgcggtgacacgatagcccgatttggaggtgacgatgggggtgctttgcgtgatggcaatgctctgcttgggctgattctcggtctgattgcccgttgcgtccgtcgtatcgttcgcgtagacggtcaatggagcggccagcatcgccacaacggcgacgccagccgccagtgcgtgtgccagacgtgtgcaatgtcgtaagactccgggtaggttcactcgtttgcctgcctgttcttcttcctggcgtagagccacgcgattttgcgttcgttgggatagctcaacacgtcatccaaatcttcaaaacgcacccagatggcgtcttccgcctcatgatccgggtctccttccaccgtcagttcaccgccggtctgtttgagcgcgaagtgatggaccagcttgtgcacgcgctgcgtggtaccggtgaaccagtagtcgatggtggcgatggaatcgatcacctcgcccaggatgccggtctcttcatgcacttcgcgcacagcggtctgctgcggggtctcgcctttttcgatatgccccttcggcaagcaccattcgagatggccggagcgggaatgacgggcgataatggccacgcggttctggtcatcgaaaatcagaccgcctgccgaatattcgcgtacgaccggcagttcctgggcatccagtgaagcgaatgtggtcggaccgtccgacgtacggcgttgcggcatcatggccggagtcgggccggatggcgtcaccggttctaccggcactgccggttccggcgaggcaacatctccggacgggtgccggccgaagaccgtggccggcgtgggatgcgctgacgttgcgggcctcactggtgctgcagacggcgctgagaccggcatggtgaccggcgttgcggccggtgcggtacgtgccgcaggcggcatcagcacgtcgcgcggagtcggtatcgctgtggtgtgcgcggcggcggccttggcgaccgcaacggcagcatctacggccgcgtgagcggtcgccgcgggatcgttcgtgacgatggttacggacgtttgtgccgtggcgataatcggctcgacctcggcaatcgtctcggcaccggcctcgccggcgataccatcagcctgcccctcgatagtgccgctggtagtggcgatggtgacggtggcatgcatgccgaagacggtggccggtgtgggcatcatcggcttcggtgcgggcatgtcgctggcggcgtccgatatttcggattcggatggttcgggtgtggcgggcgttgcgggtgtgccaggcacaccggaatgttgcgcagtcggtactgcgtctacttcgtcttgatgaacggcctgattggtggagtggctcgcggtgccgccgacatcggaagaatcgcccgaatcggcggaatgatgcggagtttcggacgtatacagcaggtggtcttgggtatggctatccgccgaatctggtgtttgccccagcatgcgggcaaggtcggcgggcgtaatcatattctccaccttactcaaccccgtgtgcaggtggggtaacggtatgctggtagggcagaaaaacgtcgcacgcgggaaggtgcccattggatttcgaagtatggcctgaagccatcgaacttggtcgactgttcgccgaacagggttacgagctggcattggtcggcggcccggtcagggatttgctgctccatagaaagagccacgatttggacttctgctcatccgcacggcctgagcagttcgagccgatactgcgccggtgggggcatgacggcttctgggacatggggcgcaagttcggcacgctgggtgccatgcgccgccgcccggacggcaccgaggtcaaggtggaggtcaccacctatcgctctgacacgtacgatccggactcgcgtaagcccgaggtcaattatggcgacacgcttgagggcgacctgtcccgccgcgacttcaccgtcaacgcgatggctctgcgcgtgcccgacctgcaattcgtggacccgttcggtggtgccagtgatctgtccaagggcgtgttgcgcacgccggtggatccgcgacagtcctttgacgacgatccgttgcgtatgatgcgcgccgtgcgattcgtggcccagctgggcttccgtatcgcgccggacgcggccgaggcgattacctcgatgcgcgaccgcatcgacatcgtatccgccgagcgtgtgcgcgacgaactgaccaaactgctgctctccgaccgtccgcgcgccggccttgaggcgttggtcgaatccggtcttgcggacatcgtcttcccggaaattccggccctgcaattgcagatcgacgaacaccaccgccacaaggacgtcttcgagcacacgatgattgtgctcgaacgtgctatcgccctggaaaccggcccggacggcccggtgcccgcccccgacctgacgctgcgcttggccgccgtgatgcacgatatcggcaagccgaagacccgccggttcgagtcgggcggcaaggtgagcttccaccaccatgacgcggtgggtgccaaaatgacccgcaagcgtttgaaggcgctgcgttttgaccaccatctggtcgaggacgtctcggaactggtgaatatgcacctgcgcttccacggctatgtggacgagccgtggaccgattcggccgtacgccggtatgtcaaggatgccgggcacctctatgagcggctgaacaggctcacgcgtgcggatgccaccacacaaaacaaacgcaaggcgatgatcttctcccaggccatggatgagatggaggagcgcgtccgcgaactcaagaagaaagaggacttcgacgcgatccgcccggatctggacggcaacgaaattatggagttgctgggcctggagcccggcccgatgatcggccgcgcctacaagcacatgctggaataccgcttggataacggtccggtggaccacgatgtggccgtcgaagaactcaagcgctggtacgccgagattcagtagtccgatactagtccgataccaaaaaaccgtacgctgaatacgtgtcagcgtacggtttttcgcgaagatgaagctgtatgcgccttactgcgccgtgtatgcgtcgtgtttggtgtcggcgggcagcttggtcatgctatcggcggccttgcaaccctcgatattggtgatggtcttaccggattgcggggaggagttggtgtcctgcagatcgttgaacgtggcgccgatgaccacatcgatgagctgatcctcgcgagccgtcatgatcatggtggcgtcggtgaaattgccgatcagcgtatacgcctgattaatggcgttcttgccgaagtagatggtggtgcgttcaacgtcggtgctggaatagttatcgattttctgcacgctgaatccacgattggccaaagcttcacccacggccttggcgaattggccgtgagaggtgccgttcatcacgcgaatgccgaccgaagcgttggacacgtattgcgctttgccgctgctgtccttgaccgcgcacggcgccgcgttgccgtaattcggctggctggccggagtctccacttcgccgaggccgaaaacgtggaaattgaacagtagggctatgaccagcactactgccaataccgcgccgctgatggaaaagacgatggtctggcggcggcgcacgtacgccttgcgggcttcacgttcatcaacctgatacgtcatcggtggacttctttcatgggtcgggtggctggttgctaccttagcgtcactgtctgacgctgatattggggtgttcgggagatttggctcgaataatacgatcgaccacagctgtatcgcgccacacctcgataatgcgttgtgccgctgcctcgtcggcggcgaaagcgaccactgaggggccggatccggagacgaatgcatggctggcacccgcctgcgtggcggcgtcgatggcctgcccgctgcggggatgcaggctgattgccgcagcctgcagatgattgcggtcgccttctgcggctcccacgatgtcaaaggtgtggtagacctcaggagtgctgagttgcgactggtatgcgccgaccaatacttcgccgctgaatccctgttctatcagcgccagctcatcgcggctgccgggggcgatatccgtgatgcgttcgccgaaaccggtgccgtatgcaaggccaccggtcaggcagaacggcatgtccgcgcccaacgtggcggcaatggtgcgcaggcgctctatgggccagttcagctcccagagacgattgaccgccagcatggtcgccgcggcgtcggctgaaccgccgcctagtccggcacccacgggaatgcgcttggtgatggtcaacgccacatccggctcgcgctcggccgcctgggccatggcgaagagggccagtaccgcatggttgcggcgcatgtcgctgcgtgaggaggccaagtcgcccaaataagcgccttcgagctccagagagaatcctgctccgggttgcttggcggttgcggtgacggtgtcgtatacgccgattgcgcagtagatggtgtccagttcgtggcgtccgccccattcgtcgtgagcaggtcccacttccaaggtgagattggttttcgccgggcaatccaccgtaatggtgatgggggagagctcatcggactgatgtcgggcagcggctgagcgtggatgtgagattaccggactcattgtgcctcatctccatctccacacgattcgatggccttggccagagcggtgaattcggcgatggtgagcgtctctcctcgacgggtcggatcgatgccggcgatggagaatgcctcggagggcgcaatggtcttcaatgccgcgtgcagggtcttgcgacgctgaccgaatgccgcatcgatcagacgaaatacgagttcccgttgtgtgccgtcgtctgtgctgttcgcagttcccggggcagccgggtcatcggcctgataccgggtgaatttgacgagcgcggaatccacattgggagccggccagaacacattgcggccgatggtgcccacccgttcggcggtgccataccaggcgagcttcacgctcggcgtgccgtagatcttggaaccgggcttggcggcgagtctgtcggccacctctttttgcaccatcaccaagaacgagccgaggttgtcgaaacgctccaacagcgtgagcagaatcggcgtggccacgttgtacggcagattggcgaccagcgtaaacgatgcgtcatcgctgaaatcaggcacgttctccggggtgacggttaaggcatcccgattgacgacggtgagtcgtgacgtggcttcgggcatgaattcggcgactgtgcccggcagtcgttcggccagcggcggatcgatttcgactgcggtcatggtggcgccggtttccaaaatcgccagcgtcaacgatcccaggccggggccgacttccatgacatgatcggcagcggtcactcccgcctcgcgtacgatacgacggaccgtgccggggtcgatgacgaagttctgcccgaatttcttggtggggctgatgccggcatcggccgcgatacgacggatatcggcggcacctaacaggtgaccagtggcgggaatggtgtcgttcataagcgtgtgttccttgtgggcttcgtaaccgatcagtaccaaccgacttgttcggaattttgccatgccttggacgggctgccgtatctttgtgcgatgtaccacagaccccaatcgatctgtacggcggcatcgtcacggtaattggcgccgaacgcagccattttgtctgctggtagcgactgaggaatgccgtaggcgccggagctcgcgttttcggcataccacagccatctggactcgcggttccatagtttgaccaggcaatcccagtcgttgcctgtccacccgcgctgcgcggcggcaccggcggcataggcctgagcctgggctacggtggcgtgccagagtcggccggagggcgtggtggttgttcctgaatcggagccggaagagccggaattgttgttcgtaccgccgccggtgttaccagtgttgccggagttgccggtgttaccggtgttgccagtgttaccggaattgccggtgttgccggagttgttgccgccggtgttgccggcattgttgttggacgactcgtgctgattgttggaaccggaatcggccttgccgttatcggcggagtcggatttcttatcggaacctttatcggtatcagacttggcggcgcctacggcgatgatctggtcgatggccatcgaggtgacggtctccgatttcagcgtctccgattcggccacgccatccacataggtgacgtcgtacacctgcgtcttctcgccgttgacgccctgctggcgcacatcggcctgcccttcagccagattcgggtcgatgatggtctgggtggagaacggaatcacggacgtgcgcgtctcctcgccgtgggtcacgcggcgtacgcgcagaatggtctcgtcgctgtctttctcaacgctgacgcgatcctccttgttgagcacgatgcccttggaatcgaggatggaggcggccggcagcttgccattgggggccaccgagcttttgccgtcggcgatgacggtgaccggcccggactggttgatcaccaggccgccggtgagctggttgtacacgttcttgatgtcgacggtgatcttcgcggcgttgttctggttttcctcgaaaaatcccagtagctggtcggcgctggtggccacggtccagaacggcacggcggtgccgtcgatgttgatggtggtctggtaggcggactgtacggtgaccacggcatgattggcgagctggtcgccggacgaggtggtcacgatatcgtgggtcttgatatccaccccttgttcctccagaagacgggtggccgtcatcgcatatgtggtgacttgggtggtttgcccgttgatgttcagggccacggatttacgcgcggtgaacgcgaatgatccagccagcgcgatactggtcgccgcgatacaggcgattacgcggatgcgacgcagtgtaacaaaccgctgcggggtccaacgccgtgccattgccatactcttcctgctgggtgaacgattacgccacccatcgtaacggttgttccggcccgtactgcggtttcaccggccaccgtcaccattcctgctcgtcagattgttctgagctcaaaaaaagaaaagaaaaggggggcgggagagaaggggatgttcccgcccccttgaaggcgcggagctggttgggggacgctccgccctcattccaggaagcccataattgggggaaggctcctggagtacttacccaaggtaagaattatatgcgtagaaaagtctacgtatcacataatacgccattttttctgcgcgacgagcctcttgtcgggatcgaaccgacgacctgccgcttacaaggcggccgctctggccatctgagctaaagaggcgattgttcttaacgcgtaaatcgttgcgaacaaatgactagtataccggtacttcccgagtggtcaatttaagccgagccgcaggcggtattgcatatgtcgcggcgtcaacttattcggccacgcagcatcaggaggcgaccgaaatcggctttccgctggcaccgatggatggcattttgccttccacgcctacctggtcagcatccagcccaatggacttgaggaagccgtccaccatattcgtgtccgccagcgtgagctgcttcagatcccagtattcgccgttgatggtgagtgtgggggaggagaaggcgccggagctgttgaacagttcggggcgcaggatcgtgtagttgttggaggcggtgagccagtcgaggtattcgttcttgccgctgaacgccgcggcggccacatcctcgctcacgccggccttgacggcctgcttctccagcttggcgttgtttaccggctcgtaattggacaattcgcccggctggaaatcctcagcgtagatgttggagaggtagctcatgaggtggtcgggatcgtcatcatgctcggcaatgtagatggcaccgttgaacacgcggttggagtagttgtcggagctcttgttgttctggaaattgaggaagtgcaaatcgatgttgagctggcctgcgttcatcagcttgacgagcgtcgggtcgagttggcggttcaccgaggcgcagccggggcacagcggttccatgtagatggatacggtgggagccccctcggctttctggccataccctttgttggagattacgaagccggccttgtcgtcggcgttagccggctgggtactgactttcttgagcttgctataggcctcgtccacggtcatgttgctttgctggctactgctgctggtgttggacggccgcatagccttgtatacggcgaatccagcgatggccaccagcaccacaataatggccaccacaatgcagccgatgatggtctgctgcttacgctccttggctgcctgctcggcccgtgcctgctgggcggcctcctcggccgctcggcgctcagcgcgtgtggcacgcttggcctgacgcttcggatctgacatagctatccccttgcaatcgcttcaatgtttgggccccatcataatgaccgggcctgaggaggactgcgcccagagctgatctgaggtgaattccctgtaaaagtgtgacggaacgaacgtatcggatacacaacggccatgtgtgcggatggctgatgtgtgagattccgccccgctctaggcgaacggcatccagttgatcggcatgcccagaatcggcatcgcgcacaaggccacggtgatgatggcccatatggtgaacagcacggtgccgcgcccgccgcccttgggcgccggcgccactggagcaggtggagccccacccacttcggtggatggcgcgcccgccgggcgactgtgtttgagcccgcgcagtacgccgccccccagccgaatcatcatcgactgtggggcgaacacagtgaccagccagccgatggccatgaaaccgcccagcgccagcccggaagcggagaacggcacatcattgagcaacggcaccggaataccccaatccgcggtgaaataccaggagatggtgtgaacgggcagtgccagagccgcggtggccacggcggttcccgccatatagatgatgactagcagcagtatgcggggaatggccagcagcagggctttgaccagatgccagggaaaagtcgccacgcgaatccacgaatcggagtttttgcgctcgccgccgcgtttgccctcgcgctcaagctggggttcggtgttataggccagggtgagcagtagccacaacaacgcagtggccgcgatgatggccacgagcggagcatttgccgccagtgccgccagcggcgccgccagcaggatcaatggcagggtgccgcgccgcagatattcccctcgcttcacgtccaccggattgggcatgggaggattttggaccatggtttcggtggggggcgcttgggcggtttggtcgatgatgcgctgcaatgccgggcgaatggtggggtccaccgctgtgggctggttgcttgcgggatcccagctgctctgggcggtgccggacggggggaatgatgacggctgcggcgtggggagtacggtggtgcgctcggccagcggcgtggtttggtccggcatcggtgtggtcgcgccggtgagtacctgtgtgccggcgtcgtcggtgaaatcggcagcagcgtcgggcaacagttgcgtggcctgctccgcaccggccggcggacgtggcggcatatcggctaagggcagcgtggcggtagcggcgccagccggcgagaatacggcggtttcgccatcgccgttatcgcccttattgccggagaacacggccatggtgggagcctcagcggcttcctcggccgcgcgccagatggttcggggattattgcggtcaacgccgccggccgcgccaaaagggggcatcgcctccgcggcttcggcaacgatcgcagccggttgtccagccacggctcccgcggcgaacggtcccgcctgctcgccctgccaagcgttgggattcaacgcatccaaggcgatggcattcagcaattgatccggcgtgcaacgatccctgcgatccgggtccagtgcagaacggaaggcagccaatgtgccggccggtagtccggaaagattcgcgttgcccgaggcctcgcgctcaagtaccgccatcatcggcttggtgccgaacacaggcgcgccggttgcggcaaaagcgagcacggacgccaccgaccaccaatcggtggcgtcgtcggattcggcaccgtcaataatctcgggtgcgatgaatccgggtgtacccatcactaggccggtgcgggtcacgtgactttcgccctcgcccatcgcgataccgaaatcgaccaataccggtccggcggccgacaccatcacattggtgggtttgatgtcgcgatggacgatgccggccgcatgtacggctttggtggcttcgatgagcttgcgggccaagcgttccagatcgtcgcccacataccggccattggcggccacatcatccttaagattcttgccctcgatgagttcagtgacgatgaacgccaacgtatcgtcgagttccatatccacgatgccgcacacacccggatgattgaccttcttcaaggccatggcctcgcgccgcaggcgctcgcgcggtgtgacatcgggcttgaggtcggggtcgtgcagggccgtggacgcagagccggagcctgccactgactcgtcggtcagggagtcgcgcagaatcttcatggcataggtggtgccgccgtcgtcgcgcacccgccacaccgaccccatagctcctgagccgagccgggagatcagcgtatacccaccaaccacttcgccggactcaagattcaacgcgttcaaatcgctcatgccctccatcctaatgccttgctggtgcattattctggctctctcctgggaggccgagcttgatatttcttggctcccctctctgagaggggagccaagaataaatgccgtttacgtattgagaagtgccgtttacgccattaaggtcgattgccctgaccggatgtggtagcaaattatgcgctcgaaatgacaggataggtgcgtgggcaggtgcgccagtcgtgaatttgcgactctataaccatcggcatcaaggatgtgtcggcggtgacccaaaggtgagccagccgggcacattcaacagtggcacagcgatgcaagggcagtatcgtgagccgctgatcgaatcgataacgatatcagattcgaatgccgcgacttcgccggtcgtaccttcgaatacttctccgaagacggctacctgttcggcgtgatggcctcccagcaggtcgctggcgctcaggccaagggcgtgtacgccttcatgaagcacttcgcgctgaacgaccaggagaccaaccgactgagcgagctcgctacctgggccaacgagcagtcgattcgcgagatctacctgaagcccttcgagatgagcgtcaagcagggcggcgcgggtgccgtgatgagcgccttcaactacatcggtatggagtggggcggttcccactccggactgctcaacactgtcctgcgtggcgagtggggcttccgcggcatggtcctgaccatcatgaagtacctcaagcgccgcaaactggccgcggcggcatcggctcccgctgacgctccggtcaaggcctgaggtgtgtctccgataactgaatagctaaatagaatggacggcctgctgagtgctactcaacaggccgtccattgtgtatctgaatgcgaaaagtcattatatggaacggaatatatcgatactgtgcattgtgccgattactgattccgacgcaagtattcgcgcaggaagggcacggcaaaatcgacttcgcctcgttctgtttcgcggataacgaaggcgtcaaggaggcgtttgcggtaggtggcggcatagttaggcgttttgcccatgcgctgtgcaacattcacggtgggagagggaccatctgacgctgccatggcttcgagatactcacggtcgtttttggataagccttgcaactccgggatgcacacggcgttatcaaggtcaatacgtgcttcctcgatacctgccgtaacatcagcgtcgatgatggtatccgagtcccgcatgtctgcggcatcccagatatggtagccaaccagttgaatcatataggggtatccggctgtcacattggctgcagtgcttaattgagcgtcggtgatggacatgccggaggcgcggaatgttgtggcgaaagcatcgcgcacttcatcaagaggaatatctgtgagtatgttcgttttcgcgcgacgtaggaacgtgatgacttcgtcattgaacaaatcagaaatcatctgtgggagaccggcgaacacgatggcgatattgcgtcgttccctgatttgatgctgtatggcagtggcgatggcaatcatgtcggatcgctcagccgcttgagtctcatcaatggtgataagcaacccagcatggcgcttctcaagcgcatccaaccgtccggcaatggcacttctcaacgtttcgggcatacgcttcggggatagttcggcttctccgaggccgatgcccgctccagcaaaagtcaacgatggtcggatagtgaggtggtcaagggcccctcgcccggttcgtaaggcatcaacaaggcgttcgcatagtccggcagaggccgtttcttcgatgacatcccatctgcgcgctttggcccggtctccgaacacagtgagcatcacggtttttccggttccacgagcgccggtgacgagcataatgcgccctggggcaccgactccgttatcgagacctttctcgaaatcgcggataactttgcctcggccgatgagcaggggcggttcccctcctgccgttggcttgaatgggttttcctttgccttcatgtggaccgcctcctcgctgaatcaacctaaaataaaaattatcaaaaatatcaaaaaaataaaaattatcaaaagttgggttgagccgactgaagaaaacagccgtggcgacaatgattctgccgcaatccgcggtgacaacaactgacgcggaccttcttggcagaatcgttgtttgtcccgcttcgccaatcaacgtcgctcaagttcggtgcgcagaccggctaccgtagcggtcagctcacgcacttcctcgcgcaataggtcgatttcgggattggctgatgttgcaatagcctcttgcgcggcttccttggccacttccttctcccgagcgtcctcgcgccgatccgtctccagattgacctgatccacgatccacgaggccagcgtggccgtcacaataccgatcaacgcgatgccggtgaacatcagcaccaccgcaatgatcttgccttggaaggtgaccggcgagaagtcgccatatcccacggtggtcacggtcacgaacgcccaccacaacgccgtgccgaagtcggtgatcgtggatccggacgccccgcgctccacggaatacacggccagcgcgcccacgtacatgagcattcccaccgcgccgaccgcgtatacggtgatgcgcccgcgcaccgccatgccggaggtgcggttcagcacgtgcagcacggtcagcaaacgcaacagtcgcaagggccggagcatcggcagcgcgatggtcagcagcgtgaacaggttgtgcttgaaccaccgccagcgatcgtcggccaaccacagcgagaccacataatcgacgacgaacaccacccagatcacgttgatgacggtttcacacagcgcgatatgcgtgcgggagagaatttcccacgaatacaccaccagaaacaccacggacagcaccatcagcggccagtccgtccacttcttccacgtcttcagtcccatattccgattgtagtggcgcgtccgctgcgccactgcggagcatgactccggacatcagtgttgtatacgttcgtatacatttcacgttgtgtgcgaacgtatacagcggtatttttcatctcgtatttcccttatgactatcaccacagtgatataatcaagaatatgtaaggagagagaaggagccggccaatggagaccgcatcgatcgaactgtggcatggctcttcgcatgtcatcaagcatcctgaatacgggctggtcaagccgaacaacgattatggccgcggattctattgcacgcgcagcgtcgagctggccaaggaatgggcgtgcgcgggactggatgacggtttcgcgaatcggtacacgttgaccacggacgggctcctcttcctggacctgtcccagccgccctacaccatcctgaactggctggccatgctggtcgaaaaccgtcgtttccagccgaccaccgccgtcgccgcgcaaggcatcgaatatctgaaacaagtgtttctgccggatgccagtcaggctgacgtcatcgtcggatatcgtgccgacgattcgtatttctcgttcgcccgcgcttttgtcaataacgcgatttccatcgaccaactcgctgaggcgatgcggttgggcgagctcggcaagcagatcgtactcgccagtcctcaggcattcgcggcactgcggttccaaggctgcgaaatcgcccgcgcttcgacctaccacggattgcgtaacgagcgcgaccgcacagctcgcgaagcctaccgccgcaaaagtgcagaagccgatctcgacggcctgttcatgcgcgacatcatccgcgagaaagtgaccaacgatgatccccgcctatgatgagacatacttgccggacgccatggccaacttggccggcgccttcgattatgcgctgaacgattgcgggttgccggtcggcctattcatggacttcttcgccacctccgaggcggccgcgcttttcgggcgaggcacgcccaaatacgtgtgtggcatgtccggcgaggagctggtggccgaaatcatgcggcaaaccggttgggcgcgcattctcgatatgccgccagccgcactgcgcgccggctcaacacccgaatactgggccggatgggtactcgcatactgccaatgggccaggggagtgcggttctcggacattctcgatgtgctgtcgctcgacgatatcgtgcgactgcacccgactctgcacgaagccgacgaaagccgattcgtcgacgtgtacgacgagcgggccgcccataatcgcaccgagggcgactcccggctgcacacgatccgcgtgcgcgccggactcagccaatccgggctggcccgccgctccggcgttaccctgcgctccatccaaatgtacgagcagcgccgcaaagaccttggcaaagctgccgtctccaccgtgctcgctttggcccgcacgcttggctgccgcatcgaagatctgttggagccgtagggctaacagcgccatattttttactcccgaccgattgtgcgtgcgaaacgacaggttgtgtaatacgggcggcgcggcccgggcgaacctgattcaatcaaactagcgatgaatcgtgcgttcgcggactgccacatcggcctcggccgagtcgggcactgcgtcgagttggcactgcacagacgcggtgcctgcggcgtggcgcaacggattcgtcagacagccgtacaacagtgcaaggaagaacgatatggaacttgaagaactgtcggtcgccgagaaagccgcgatgctctctggcggctctgaatgggattcccgcggcaacgagaaggccggcatccccagctttgtgatgagcgacggcccccacggtgtgcgccgccagctcggcgaaggcgatcatctgggcctcggcgcgtccaagcccgcaacctgcttccccacggccggcacggtcgccaattcgtgggatccggcgctcgccgaggagatgggcgaggcgctcggccaggaagcccacgatctcgacgtgaacgtgctgctcgggccgggcatgaacatcaagcgcaacccgctgtgcggccgcaattttgagtactattccgaagaccctatcgtggccggtcgtatggcagccggtctgattcgcggcattcagtccaacggcgtctccgcctgcccgaagcatttcgcggtcaacagccaggagctgcgccgtcaagcctccaactccgtggtcgacgagcgcacgatgcgcgagatctatctcaccgcgttcgagatcgccgtgcgcgaggccgcgccgatgacgatcatgacctcctacaacgagatcaacggcgtgtacgcgcacgagaacaagcacctgctgcaggacatcctgcgcgacgaatggggcttcgacggcatggtcgtctccgactggggcggatcgaactccgcggtcgccgcggtcaaggccggtggctcgctcgaaatgccgtcgcccggctacacctccgtgcgcgaactcgaaggcgcggtcaaggccggcaccttgtccgaggcggatttgaacgcccgcgccgccgaagtcgccaagatcgcgcgactgaccaaaaccgagggcgtaggccgagacgacctgctcaaggatgctgtcgctgcggcccaccacgaggtggcccgcaaggtggccgagaactcctctgtgctgctcaaaaacgccgcggccgctctgccgctcgcggccggcactcgcgtcgccgtaatcggcgacatggccaaaaccccgcgattccaaggctccggctcttccaaggtgaatgccactcgcgaagagaacatccttgatgagctcaagaacgccgcagcagccaccggcgtgaccgtggccggctacgcgcaaggctacgaccgccaaggaaccaagaaccagacgctcatcgacgaagccaaaacgctcgccgccgccgacaccactgatgcggtgatcgccgttgtcggcctcgacgagcgcagcgaatccgagggcctcgaccgctccaccatggcgatcccgcaagtgcagaacgatctggtcaacgccctgaccgccaccggcaagcccgtcatcatcgtgcttgtggccggctctccggtcgagctgccatggttcgacgccgtgtccgcaatcctgtacgtcggcctgtccggccaagcgggcgcatccgccaccgtgcgcgccctgaccggccagatcaacccatccggtcacctggccgaaacctggccgatcagttacgtcgactgcccgtccgccggctggtacccggccattggccgtgacgccatctaccgcgagggcccgttcatcggctaccgctactacgaaaccgccaacgtgccggtccgcttcccgttcggctacggcctgagctacgcgaccttcacctacagcaacctgaccgccgacgaaaccggcgtccagttcaccgtgaccaacgattccgacgtgcccggcgccaccgtcgcccagctgtatgtgaccggcccgtccgacggtgtgctacgccctgcccgcgagctcaaaggctttgccaaggttcagctcgacgcacacgaatccaaaaccgtgcgcatcgaattcgaccgctacaccttccgccatttcgacacggcagccaacgcatggcgtaccgaatccggcgtgtggacgctggctgtcggcaccaatgccgaagacctgccgctgacctgcgaattcgcgatcgccggcgacgtggacgccatccccgccgaccctgcgctcggccactacctgactggtgacgtcaagcacgtgaccgacgccgaaatggccgtgctgttcggtcacgaggtcatcgcccccggcaaacccacgaccttcggcgtgaacgacccgatctccagctgggtcgattccaagggtctcgtcgcccggaccatcgctaaaactttgaccaaccgtgaggccaagacccgccagaagaccggcgcaccggacctcaatatgctgttcatcctcaacatgccccccagggccatgagcaagatgacccagggcatggtcgattcggccatggtcgacgccatcgtcaaaatcgccaacggccacaccttccgcggcctcggcggtatcatcgcgggctacttccgcaaccaatccgccaacaaacgcaccgcaaaggagctgaacaatgactgacaccaacgccgcccccaccgaggagaagccgactggccccatccgccgttggattaagaatcatccggccatctgggagttcatcctgttcaatgtgctgtccaacatctctacaatttcccgtttcgtggtcacgtggattggcactgcgattttcgtctccgcaatgggcctgaccgcgccgttccacttcctgatcttcaactacccagaaagcggcaatggcctgggcggcttcctcaccttcctgtttgccgaggtcatcgcgcaggtagtcaacttcttcgtgcagatgaagtgggtgttcaagtctgactccagcttcaaggatgccgcttggaagtacgcgattctcgccgtggtgatcgtggtcgtcaatctggtactgccgggctacgttacctctctatgccagggctggggcatgaacgccggcgtggccggtaccatcgcctccgtggtcaacactctgctcgccgtaattgtgagcttcccgctgctcaagttctggatcatgccgaagaacaagtgagcccccgcgaacttacgatttccccgtaatccttttctggcccggccggatgcccatgtggacattcgaccgggccttttggcgtcatgcggagtgacaatcgcgagattgtgggtttcaagggtcaaaacagtccctcgaaacccaagatggcggttgcggggcggttgaggatcagtcgaagaacggttcaaacgcaaatgtgaacaatgccacatgtgattgggcgggtcgctgcacgccgattttcggggctgcttaggaatggcgaaatatcaacgaaatccctatatctaggttttttgtgtgacacacgccactacatatagtgccttgatttcaaatcacaccgctgtaatatggccttcacttcactgttcatcagaaccacatcaaggggagtcgccatgaccgtcaccgtgttcaccaagccgcattgcccgcagtgcgatgccaccaagcgccagttcaccaagctcggtgtgccgtttgaaaccgtggacctgacgcagaacccctccacccttgagcagctgcaggccgccggcttccagcaggccccggtggtcatcacgccggacaactcctggaccggctaccgccccgacctgattcgcgaagtcgcccagcaggtggccgccgacaaccgcgccgccgccacggtatccgcgtgagtctgagccagcccgaattcgcggccgacggcaagacgatcggcgcattggtctacttctcgtcggcctccgaaaacaccgcacggttcgtggctggatgccgtttgcaggacgaaggcatcaacgtctatcgcatcccgttgcgggccgccgacccggcgctgaacgtccgcgaaccgtacgtcatcatggtgcccacctatggcggcggcgtggtcaagaaagcagtgccgattcaggtcaaacgcttcctcaacgatccagccaaccgcgagtggattcgcggcgtcatcgcctcaggcaacaccaacttcggcgaggcctactgtgccgccggcgacatcatcgccgccaaatgccacgtcccctacctataccgctacgaactcatgggcacgccagaagacaccgctgccgtccgcaacggcctcgtccgattcttcgctcaacagcaataaggactccaatgaccgacctcaccaacaccgaactgtcgctcgacaacactgccgacactgcagcggaacagtatgatccggcgcacgattaccacgcgctcaacgcgatgctcaacctctatgacgccgacggcaagatccagttcgacaaagacaaggccgccgaacgcgaatacgtgaccgggcacgtggccgccaacatcaagcggttcgcctccaccgccgaacgcctcgactacctcatcagcaaccagtactacaaccccgacgtctttgcccagtactccgctgaattcctcgaccgcttctacgagcacgtcgagtccgccggctttgagttcggcactttccttggtgcgttcaagttctacacgtcctacgccctcaagacgttcgatggtcgcctctatcttgaggacttcccgcagcgttgtgcggcagtggccttggaactcgccgccggcaacgaagcgcaggccaccgaatacgtcgacgaaatgctcgccggccgattccagcccgccaccccgaccttcctgaacctcggcaaggcccagcgtggcgaaccggtcagctgcttcctggtgcgcatcgaagacaacatggagtcgatttcgcgcggcatcaacgcggccctccagctctccaaacgcggcggtggcgtggctctgctgctgagcaacctgcgtgagctcggcgctccgatcaagcacatcgaaaaccagtccagtggcgtgattccgattatgaagctgctggaggattccttctcctacgccaaccagctcggcgcgcgtcagggcgcgggcgcggtgtacctcaacgcccaccacccggacatcctgcgcttcctggacaccaagcgagagaacgcggacgagaagatccgcatcaagtcgctggctcttggcgtggtgattccggacatcacgttcgaactggccaagcagaaggcccagatggccctgttcagcccgtacgacgtggagcgcgtgtacggcaagccgttcgccgacatctccgttaccgagcattatgacgagatggtggccgacgaccgcatcaagaagacctacatcgacgcccgtaagttcttcaccaccatcgccgaactgcagttcgaatccggctacccgtacatcgtgttcgaggacacggtcaaccgcgcgaacccgatcgaaggccgcgtgaccatgtccaacctgtgctcggaaatcctgcaggttcaggagccgagcgcatacaacgaggacctcacgtatgcgcatgtcggccgcgacatctcctgcaatctgggttcgctcaacatcgccaaggcgatggatggcggcttggctcacacggtggagacggcgatccgcgcactcacctcggtggccgagcacaccagcatcaacgcggtgccttcgattcgccgcgccaatgaggagggccacgccatcggcctcggccagatgaacctgcacggcttcctggcccgcgaaggcatccactacggctccgaagaaggcctcgacttcaccgacatgtacttcatgacggtcgcctaccacgcctaccgcgcctcgcacgcgctcgccgtggagcatggccgcgcgttcgccagcttcgctacgagcgactacgcccacccggccggccagggcaactacttcgacaagtacaccgatggtcgtcgttcgctcaccccgcgcaccgaacgggtccgtgcgctgttcgagcagtacggcatcgcgattccgactgcggccgattgggaggccctgcgcgacgcgattctgaaggatggcatttacaaccagaacctgcaggccgtgccgcccaccggctcgatctcgtacatcaaccattccacgagctcgattcacccgatcgcctccaagatcgagattcgcaaggaaggcaagatcgggcgcgtgtactacccggccgcctacatgaccaacgacaaccttgagtactataaggacgcctacgagattggctggaaggccatcgtcgacacgtacgccgaggccacccagcacgtggatcagggactgtcgctgacgctgttcttcccggacaccgccaccacccgcgacctcaacaaggctcagatctacgcttggcgcaagggcatcaaaaccctctactacatccgcatccgccagcaagccctggaaggcactgaggtccaaggctgcgtcagctgcatgctctgatcgttcgatggagcgtataccgcctttcttcggcactcgacgtaccttcgtacgccttcggcctcagacggcggtctccgcacacatcgaacaaccagaggccactctaaggaacctgcaatgtcaccaatgatttataaggcactgctccggctgaccgcgccggaggagtttgaaaacaagcccgccgacaactcccaagacgagtaatgcaaaggaatccccatggcaccgatttccattccgcgcaaaccgctgaaactcatcgaccgcgtctccgcaatcaactggaaccgcctcgaagatgagaaagaccttgaggtctgggaccgcctgaccggcaacttctggctgcccgaaaaagtccccgtctctaacgacatccccagctggcagaagatgaccgaggacgagcacacgctcaccatgcacgtgttcaccggcctgaccctgcttgacaccatccagggtacggtcggcgccgtctccctgattccggacgcgctcaccccgcacgaggaggccgtgtacaccaacatcgccttcatggaatccgtgcacgccaaaagctactcgtccatcttctccaccctgtgctccaccgaacagatcgatgccgcattcgactggagcgagaacaacgagtttctgcagaagaaggcggaaatcgtgctcgactactacgagggcgacaacccgtacaagcgcaaggtggcctccaccctgctcgaatcgttcctcttctactccggcttctatctgccgatgtacttctccgcgcacgccaagctgacgaacaccgccgacgtgattcgtctgattatccgcgatgaggccgtccacggctactacatcggctacaagtaccagaagggcatcgcccagctgagcgatgccgagcgcctggatctgcaggactacacatacgacctgcttaacgagctgtacgacaacgaggtggagtacacccagtcgctgtacgatcgcgtgggcctgaccgatgacgtcgagaagttcctgcgctacaacggcaacaaggcgctgatgaacctcggttacccggctttgttcccggctgagatttgcgatgtgaaccccgcgatcctggccgccctgagcccgaacgccgacgaaaaccacgacttcttctccggctccggctcctcctacgtgatgggcaaagccgaagaaaccgatgacgacgactgggacttctgattcacctcggcagcagcaccgtcagcacaaaccagtggtcctcggtgcgaattgtcacttcgccgccgtactgcatggcgatgtgccggattgacttcacgccgaacccgtgccgcgacgaatcacgcttggtggtgcgcagcgcgccggtcgaatccttcttgagcgcggaatcgtagtagttttccacgcgaatcaccgtgaactgcccctgcccgtacagcgcgagccgaatcagccgctgctgcgggtcgggcagtttgctggtcgcctcgatcgcgttgtccagcgcgttgccgaacagcgaggcgatatccatcgacgacatgccctccagcagcttgccgtccgccacggcggtcagcgtgatgccgcgatccgcgcacgtgcgcattttggtggtcagaatcacgtccagcaccggattgccggaatgctgctgggcgctgacttgcgccaccgaagcctccagctgctcgaagccggccgccgcatgctccgggtccacctccgcgcgcaacgccgcaatctgatgcttcagatcatgcgcaagccgcccgatcgactcgatattctccttggacgccagatactcctgatgctggctttccagctgagcgttgatggacgtcagctcggcgctcgcctccatgcgccgcgcctgctcctgctgcgcgtacagaatcgcgaacccgcagaaatccaccaacgtgcggatatagaacacctcctggcccactgtgccggagaacggcgtattggtggacacaaagctcaggttgctcatggcgaacgtcacgatggtgatggctcccgtaccgattgccagctgcgctgtggcgacggtcggcgcatcattggcaaaattgccgcgttcgattagccacgccaccgtgaagcagacggcgtacgtgaccgccagtaacagcagtgagaacaactgcgcccgctcggggttctcgcccaagttcaggaacatcaccaactgccagtgcaacgaggcgaccagttcggccagcacgaacgcgcgcgccgcaatatacatgccctcgcgcttgccggtgcccgcgccgaacaagataatcgcccacatgccggcgaacgcaagcagcataccgatgacccagaaccagatgggcatcacgccgtcgaaatactggatagcgatcatcgccggcaggccgataagcccgaccgcaatcgtgcgccgcagcggcacgcgccggtagatgaccagcagatagaccacgcaggccagccattcgcagatgccggtgtacaggcgcgggatgtccggcagcgcattggtgatggtggtgctcatcacgccgcgcccatgtagttcgccagcgcggtcaggaacgccttcttgcgcggccggctcacccgcagcagctcctcgttcgacatcacgcagtcctgcccctcgacgcccaccacatgccgcagattcaccagatagcaggagttggaacggaagaagtcctgatcggctagtcgctcctcgaaatccttgagcgtgccggacaccgagagtttgccgctcaacgtatgcacgatgatcgtgtgccgaatcgactcgagatacagcacatccgccagctccacgcgcatctgccgcccgccggcctcgatgagcagcgactcgctgccacgccgacgcaccatatcgatcgaccgtttcagctcctggcggaatgcgaagtacggcaccggcttgagcagataggagagcgcctgcacttcgtacccgttgatcgcgtactgcggggcggcggtgatgaacacgataaccacagtgttgtcgcgctcgcggatgcgccgggccgccgccatgccgtccatgtgctgcatctcgatgtccagaaacagaatgtcgtacatcggcgtatatttctcgacgatttgctcaccatcgtcgaatacggaaatcgtgaattccgtaccggtttcgctacggtactgattgagatggtcaagcacccgttggcaggaggcgggatcgtcctcgaccactccaaccctgatatcgcgcatgactgcacctccctgtcacgtcttctccaagcatcttatcctgatgtccctgatatcggccggattccatccgcgttcgtgcggcggcgttacgctggagatatggaacaggatccgttggtcagcatcattattccggtatataaggtcgagaagttcctcgacgaatgcgtggcgtctgttgccgcgcagacgtacgccaatctggagattctgctggtcgacgacggctcgcctgacaattgcccggccatgtgcgacgcctgggccgcccgcgacccgcgcatacgcgtgattcacaagcccaacggcggcctgtccgacgcccgcaacaccggcatcgccggggccaccggtgcgtacatatacttcgccgattccgacgataccgtggcccccacgttggtggaggactgcctgaatgccatgcgtgaatacgatgccgatctggtgatgttccagttcgacaccatctccgagaacaacaagccgctgctgtccaactatcgccacaacgacttcaccgaggtgcaggtcctgaccccggtcgaggccatcaaaaagcaagtcaaggctgagattgacggctatttctgggccttcctggcacctgcctccacctatcagggcaccggattctccttcccggtgggtcgcaaaatcgaggatctctcccgtatctgcaacgtgatcggcgaggccacgcgcgtggtccgtctgcccaaggcgctgtaccactaccgcatgcgcgaggggtcgattaccgccaactgggatccgcagctcacccgcgactggacccgcgccgccgacgaccgcgaggaatacatcgtccaccgattccccgagctcaagggcttcatgacgctgcaacagctgaatttttttgccaacctcgattacgagaccatgcgccagtcgctgatcgccgggctcaagatcgatcccgaggacgccgacgcgcttcgtcgtcgcatcgagggcctgaccaagtccgccgatgagggcgatgagcccgtaccggaaacgttgcgtgagttgctcggactgctcaagctgggcatcaccaaggtggccgatggcacgttcggtaaggccgatggcagcggtactgatggcgatgccgagaacgatgacgcaacgctggccgaccgtttccgcgacatgcgcgaggactggcgccagctgcgcatccagcgcatcgaaaacgccgaggagcgcaaggccgagcgcaaagccgcccgcaacggcgtcaccttcgagtctgtgttgcattagtcggcgactgatggaatccgtcagttcgggaagagcaggcctgctctacgccgggcgtgccggttcgcacgttcgagaaacaggcgtgtcatgggccgaaccacacaacacccccagaaacgcccataaagttaactacattttcagacacgccacttgccttggtccacggtccgtgtatagtagttctcggctcaacgaagagaaccttcactgaaccggaaaaaaagtaaacgctgaagcttgcagtttccgaaagcaaagttgtacgtcggtggcgagggcggaagcgcagtaaagaacaaatccctttacaacggatcgtgaggcacgtacctgcctctgaaaggattagtaattatggcagaagtcgttttcgaccacgtcactcgtatctacccgggcaacgataagccctccgtggatgatctgaatcttgatatcaaggatggcgagttcctcgtcctcgttggcccttctggctgtggtaagtctacgacccttcgtatgctcgccggcctggaggaggtcaacaagggccgcatcctcattggtggcaaggatgtcaccacgatgcagccgaaggaccgcgacatcgcaatggtgttccagaactacgctctgtacccgcacatgaccgttgccgacaacatgggcttcgccctgaagatcgccggcactccgaaggacgagattcgcaagcgcgtcgagaaggccgctgagattctcgacctgaccgagtacctcgaccgcaagccgaaggctctgtccggtggtcagcgtcagcgtgtggccatgggtcgtgcaatcgtccgtgagccgaaggtcttcctcatggatgagccgctgtccaacctcgacgccaagctccgtgtccagacccgtacccagatcgctgctctgcagcgccagctgggtgtcaccaccctgtacgtgacccacgatcagaccgaggccctgacgatgggcgatcgcatcgccgtcatcaagctcggtatcctgcagcaggtcggcgccccgaccgagctgtacgatcgcccggccaacgtcttcgtcgccggcttcatcggctccccgtcgatgaacctgaacacccacccggtggtcaacggcaaggcgaagatcggtgaggacaccgtggacctgccggctgaggccgtcaacaagctcaccgccgaagacaacggccagatcgtggtcggcttccgtcctgaggacgctggcctggccccggctgacgacccgaacgccttctccctgaaggttgtgaacgtcgaggatctgggctccgatggctacatctacggcaacatcatcaccgatggctccgccgctgaggcttcccaggtcatgtccgaccagaacaagctcaccacgattcgtgtgaatccgcgtgcgctgccgagggttggcgcgaccgtcaagatcaagatcgacccggccaagatgcacctgttcgctccgtcgactgagctgcgtctgaactaatagatacttggcgaggtctaatcgcttcgtcaaccattaaacgaggttattctcttcctctcttatgacctcgttggaaaagccctgcatagctgcggggcttttctttttgccttctagacggtctgagggagagaccaaacggtgttttcccgtaaacataacgcgccgaagtcgtggccaaggagcgcacttcccaagcaccacgtaaaatcgaacacatggagttgaacgaattgccccagatggatccgcgtgcgctgaaggccacgtctgtcaaagccgaagacgaacacgccgattcagcggaaccgcaagcactgaaaatcaccgccgccagctcgaacccaaagatgttcacgctgccctggcacaagcccttggccacctggcctgaggacctgctggccaacctgccgcgaggcatctcccgccacgtcgtgcgattcgtgcacgtgggcgacgaggtgtacgccatgaaggagatcacgcgtcaggtggccgagcgagagtacgagatcctgcgtcgactgcagaagctcgaactgccaactgtgaccccgatcgccgtggtcaccggccgtcacacccgtgaaggggagccgctggaggcgattctggtcacccggcacttgaagttctcactgccgtaccgtgcgctgttcgcccgcaacctgcgcccggacaccgccgaacgactgatcgacgccctcgccgtgctgctggtgcgcctgcacctggccggcttctactggggcgatgtgtccctgtcgaacgtcctgttcctgcgcgacgccgacgctttctccgccttcctggtggacgccgagaccggtgacctgcaagtccagctcaccgacggccagcgcgaatacgatatcgacttggcccgcaccaacatcatcggcgaacttatggatttggcgtccggcaagctactgcccggcgacgtggatgagatcgaggtgggcaaccgcctggtcgaccgctaccactcgctgtggagcgctctgaccgacaccgacaagttcaacccggacgaaatgtggaagatcgagcagcgcgtcaacaagctcaacgagctgggcttcgacgtggacgagctggaaatgaagaccgccgaggacggcaagcgtgtgctggtccgcccgcgcgtggtggacgccggctacgccaaccgcaagctgctgcgcctcaccggccttgacgtgcaggagaaccaggcccgtcgtctgctcaacgaccttgacgcctaccgtgcctccacgtggcgtgagggcgaggatctggaaatcgtggccaccgactggatgcgtgaggtgttcgagccgaccgtgcgtatgattccgcgcgaatatcgctcccagatcgagcctgctcagttcttccatgaggtgcttgaccatcgctggttcctggcggagaaggccggccacgacgtgccgatgggcgaggccgtgaccagctacatcgacaacgttctgccgagctacagccttgactccaaggcactcgccgaacttaacgaagaggccgattccggcgtcattgacgacgaatccacctacagcgacccggacgacgacggctacaaccccgatgacgatccggatgcggcagtgtggagtcattaagcggacaatccggtggactgtctgtaggtgagcccatcacacaaagaagcccctcaaatagaggggcttccgtgtatgtacaacctattacggcctcaagcgacaatcactccgccgcagccttgcgccgtgcgttggacaccgcgtacaggctgatacccgccgccactgaagcgttcagcgactcaacagacgagctgatcgggatgccggcaatcgcgtcgcaggtttcgcgcaccagtcggcccaaaccgctgccttccgaaccgagcactacaacgagcggatcggattcaaagccagtctcgccgacgagcttatcgccgccaccgtcaaggccgacaacgtagtatccacgctccttcaagccctcaagtgccttagtcaggttcaccacgcgcgccaccggcatatgcgcggccgcaccggcagacaccttccaagcggcggcgttcactgaagcggaacggcgttccggcagaatcacaccattggcaccgaatgcggccgccgaacgaatcacggcacccaggttctgcggatcggtcacgccgtccaatgcgataaacagcggtcgcgcagcaatacgggcggccgccgaattcgcggcctccattgccttggccttcttctcagcacgatcggccagctcgttcagcgaggagtactggaacggatcgaccttcagaatcacgccctgatggttgccagagcgggcgatacgatccatctccagacgatcggcctccagcatgtgcaggccgttcataccagcgattttcacgatttcgcgagtacgatcgtcatgttcaatacgagacatgatgtacagcgtggaagaaggtacgcctacgcgcagtgcttccagcacggaattacggccgtacaccagatccgaagtatccgccgaagcgaacttgtccactcgacggcgggctgccagacgcgggtcggccatctgccgacgttcggccgctttcttggccttgtacgccttgtgatagacgcggtcctcggccttgggagtggggccgtagcccttcagtttgttgcgatgcttgccacccgaccccttggtcggtccttttttgatagccataggtgctattgtcccagcaccccgcgccaaaacgcggctattccgccgtcggtagccggtaaggtattgagagtgaagaagcagcgtatgatattcggactgtccctgctgtattggggattatggttggcgattctgattctgtggatgggtcgcttcgtgacctcattcttgtcgatatatttggtttccgcgctgcgcctcgatgagggtgtggtgggcacagtcgtggccatgtacggcttcggcgcaatcatcggctgcctgttcggcggtaccttgtccgacagattcggccgccaatccatgattatcatcggcgaaatcggcgcagcggctgccctgctggtcgtttccgtactcactgatcctgtgtctttaggcgcggctctgttcgtctatggtgcgttcgcctcgctgcccagcccggccatcgccgcgtatatcgcggatgtggtgcccgccgaacgtcagcaacgtgcgtacgtactgcaatcgtgggcgattaattttgggtacgcgattgggccgattgtggccaaccggctggtcaagatctcgtattcgctgatgttctacgttgaagcggcggtgatgatagccgtcacgatattgctgattgcgttcttccgcgaggtgcggcatttggggattactgtatcggtgccaagtgtggtgcgccatgaagacgaacgcagtgttacgcatgcggaattcgccggcgtcgaggggccgaatcactcggatgtcgcaccggctgccagtgccaagggctccatgtctcgcaattggcggcgcgtgctcactgatacgccattcctcggcttctccctgctgatgttcggctacttccttgtgtacttccaaagcacctccggcctgcccattgccatgacggaccttggtctagggctgggcgagtattcggtgctgctcaccatcaatggcggtatgttgtgcctgctgcagattcccgcgatgaaactgttctcgcgcatgggcaattcacgcgtgctggtgatgggcctcgccgtaaccgtcatcggctatgcggtgcaggccgcggcccattcctggggcggattcgcgcttgccgtagtgctgtggacgctgggtgagctgggcacattccctatcgccaccactacggttgccgccatggcacccgcgtcggcacgcggcacgtatcagggcgtctacaacgtagtgtggtcggtatcgattgcgctggcgccgctgattggtggctggaccatcagcaacttcggcggtcgaacgctgtggatcgcctgcactgttgtgttgattgccgtgaccctcggtctcaagctcaccaaaggctcgcgcgaccgcgccatggcccgcagtcttcacgattcgctgtaagcgttattcggtttggagatacgggcaagaccgcatatggcgagtggttcttatcgagaactattctctgcgcgtatgatgtatggcatgcagtacattcaacaaaccatcgttggcattgatggcagcgaggcgcgattctttggctatgtggccgacaacagcgaggagatggaaccggaccgtatacgcccggccatcctgattttgcctggcggcggctacgccatgacttctgaccgcgaagccgagccagtggccctgcgattcctggccaaaggcttcgccgtattcgtgctgcgctattcggtgcagcccagccgctatccggtggctttgctggaggctgccgaggcaatgcgcctgattcgcgccaatgcggatcagtggcatgtaaaccccgcgcaagtggccgtactcggcttttccgcaggcgggcatctggccgccaacctcgccacctcggtcggcgacgaagacatccgcgaacagggcggcatggacccggacgccgtgcgcccgaacgcgctgatgctctcgtacccagtaatcaccgccggcaagtacgcccatcgcggcagcttccaatgcctgctaggggaccaagctcacaatcaggctttgctggacaagttctccatcgaaaagcacatcgacgccaaaacgccacccgtcttcgtctggcataccatgaccgacgacgccgtgcccgtggagaacacgctaatgctcatccaggcctgccgggccgccggcgtgagcattgaggcgcacctgttccctgaaggcagccacggcctgtccttggccaatgcggaaactgccggtaacggcttctatgcgcacatcgtcgaatgcgtgcagtgttggcctgatttggctgaggcctggttgcgtcgcctgttctaggcaaaacgctattacgctgtgcgccaagtgcgccacgcggttatggaataatggcaatcgtatgcatcggcagcagttgcgccggtgtccataaccgcgcagtcctgtgcgtccagccgggagagaaaacccggcagcggccgcaaggctgactactccgcggcaataccaaggagaacattatggatgatctcaaagatcaatccgcagtgtccacgaccgcaacgaacggggtcgtggaatcggaagaggtgcgcgcacaggaagcgctattgggggatactgatccaagtctgaccagcgccgacgacgtggccaaagccctgaacgtcgacccatcccacggcctgagcgaggaagaagccaagcgccgactggccaaattcggcccgaacgagctcgccagcgccccgcccgtaccgaaatggaagaaattcctggcccaattccaagatccgctggtctacctgctgatcgcggccactattatctcggtgatcgcttggttcatcgaaaaagccaatgcgcagcccggcgcggaaggcggcgaagtgctgccgttcgacgccatcgtgatcatcttgatcctgattgtcaatgctgtgctcggctatatgcaagaagccaaggccgaggcggccgtcgaagcgctcgcacaaatgacggccccgcagacctcggtgctgcgcgatggcaaggtcatgcgcatcaacaccgccgacgtggtccccggcgacatcatcgtccttgcggaaggcgattcggtctccgctgatggccgactggtcaacgcggccagcctgcgcatcgccgaggcttcactgaccggcgaatccgtgccggttggcaagaagccggacacactcaccgaagccaaggcgctgggcgaccgcgccaacatgatcttcaacggcacttccgtgacgcaaggcaccggccgcgcaatcgtgaccggcaccggtatgaatacgcaggtcggcaagatcgccgacatgctctccgccaccgaagatgagaaaactccgctgcagaaggagatggattacgtctccaagatcctcggcattgcggtgtgcgtcatcgctgtcgtggtgctggtggcgctcgccgtgctggaaggcttcaacgacgtccatgacgtgattgattccttgctgttggctgtctcgctggctgtggccgccgtgccggaaggcttggccgccatcctgaccgtggtgctggcgcttggtgtgcagcgtatggccgcgcacaacgccatcgtcaagaaactgcattcggtggagaccttgggctccgcttccgtgatctgctcggataagaccggtacgctgacccgcaacgagatgaccgtggaacgtgtggtcaccccgtccggcgaagtgcagatcactggcaccggttacgcgccggaaggccgcatggttatgaccggcggcgtcagtcctgaatccgagcaggcccagattgtggccgatgaagtcgtcgccacgctcgtggccggcacgctcgcgaacgacggcgaactacgcgaggagaacggccgttgggagattgtgggcgaccccaccgaagtctcgctgatcgtggccgcacgcaaggtcaaggccgatcgcaagatcaagcgatacacgcgcgttggcgagattccgttcacctccgaacgcaagcgcatgtccatcatcgccaaggacagcaccgattcagacaagctcaccgtgttcgccaagggcgcgcccgacgtgctgttgagctactgcacgcgcatccgcgtgggtggtcaggtccgtaagctcaccgaaggcgatcgccagtcgattctcgccaccgtcgaacgtctctcctccgaggcctaccgtacgcttggcgaggcctgccgtccgctggaaaccggttctttggctgatgtgcccggtgtaagcgtcaacgctgcaggccaggtgtccgacatcgccgatcaggccgaagccattgaaaccgatctcatctggaatggcatggtcggcattatcgatccgccgcgtactgaggtgcgcgactccgtgaccgaggcccatcgtgccggcatccgcacggtgatgatcaccggcgaccacccgctgaccgccgcccgcatcgcctccgaccttggcatcatcgccaaggatggcaaggccctgaccggcgaccagctcgaccagctgcccgatgaggccgcgctcgacaaggccacgtccgaagtgtccgtgtacgcgcgcgtggcccccgagcacaagctcaagatcgtcgaatccttgcagcgccaaggcaacatcgtggccatgaccggcgacggtgtgaacgatgccccggcagtcaagtccgcggacatcggcgtggccatgggcatcaccggcaccgaagtgaccaagcagagcgccaagatgattctggcggacgacaacttctccaccatcgtggccgccgtacgcgagggtcgcgtgatcttcgacaacatccgcaagttcctgcgctacctgctgagttccaatgtgggtgaggtgttcaccgtgttcctcggtgtggtgtttgccggcttcctcggcatccgccagccggaaaccgtgggcgtcaccgtgccgctgctcgccacacagttgctgtggatcaacctgctgaccgatgccgcgccggcgttggctatgggcgtggacccgcagaccgacgatgtgatgggtcgtaaaccgcgtaaggtgacggaccgcgtgattgacgcctccatgtggggcgacatcatctacatcggcgtcatcatggccatcgtcacgctgattggtatggacatgcacctgtccggcggcttgttcaccgaccgctcggtggatgccatcggccatgaagcgcagatgaccgaggcccgtacgatgggcttcacgattctggtgtttgcccagctattcaacgcgctgtcctcccgttcgcatctgcagtccgcattcgtgggtctgttctccaacaagtggctatggggtgcgattggtttgtccgtggcgctgcagctcgtggtgatttacgtgccgttcctcaacggtccgttcgacaccgtggcattgagcccgatggcttgggtggaatgcatctgcctggccgcaatcgtgctgattgcctccgaactgcgcaagattgtgctacgcgcgatggccaagcgttaagccatcgcaatagccctgattgtgggcatatagcagtgggccgggctctggtattcagagcccggcccactgctatatccaaacggctcctcatggggcggtaactatcccatggggcggtcgctgaaaacggcattattccgcgaaaaaggaaaatatgctaaccgccccatggggagttaccgcccatgagaaacaggagaacgctgcagacctcagttgtggctgccgtcggtgtcgtcagtagaggtggagttgtcgccgccgttatttgttgtcgctattgttggactcgtcttgagacttctgctgtgcctcttggtcggccttctgctgagcctcttcctgagcttgcttggcgacatctgcctgctgcttggcctgcatcgaggcggtgacgtcggactcggccttctgcagtttagaaatcgcattgttgacgtcggattcggacggactggtcccgttcatcaccgtattggcctcggtgatggcgttttgcagcgcggtgcgggtgttttcatcggccacactgcccgcggaattatccagcgtgccctgcgcctgcgaaatagccgagctcaggttcgatttcagtgtgttggtatcggccgtcgcctttgaagtattaacggccttgatcgcattgttgatggcatccgtcttgtcagccatgtcgctggcatcattctgcagctctttagtgtgagacttcaactcagtggcgttgaggctggaatcgcacttggcggtgtcagccggattgccggcgtcttgcaacgcctgattcagcgtggtgagcgtattggcatcggccacatcgctggtggatgtttgcgcgctggtttggccattggatatggcggtggtgagcttcttctgagcattcgtgtactgcttggccgctaccttgcactcggccaatgccacggcttggctcgccttgctgctgttggaatgccaccagagcaggccggcgacaaccagcgctatcacggcgactactgctacggcaatgctgatgatcttgcgggtgttctttttgccgctaccgccgtgacgaggctcggcgccatcggaatcgtcctcatcggagacctgatccaacggaatggagggaggcatcacagcaggctgagcctgtgccgaagcggccagggcggccggttggaacacctgtgtggctgcagcatcatcggcagacgctacttgcgttgccggcatggtaacggtctcaccggatacggtggatgatgcgccgtatgcctgtgtggccgcagctgaatcaggctggaatgcctgtgtggccgcggtttcggcattcggcatggcctgagcttcgaaaggctgtgttgccatgacctgatcaggctggaacgcttgtgttgcctcggcatctaccgcaggctgctcggcctgattgggttggaacgcctgtgtcgcggcgtttgaagctaccgaaacaggcgatgtcgccggtgccgctggtgcggctggtgctgctggcgtcactggcgctgtcggttccaccgggcggaagctttgcgtcgtctgatcccaaacgtattgctgctggccgggcgcagcggcgattggtgtttcggatactactggctgcgtggctgccgccggctgtggtgcttgtgcggcaaccgcagccgggaattgcggcgagaacggttgcgtcatggccggatcgatgggctgcgtcggctgagcggcttgtacgggcggcacagcttgcgtgggttgtgcggcatacgctgcttgcgcgggctgcacaaactgtgtgggctgcgcagactgcacagcccacacagactgcgggaactgcagcgccggtatgtcctgtgccgctggctgcgcaccatatgctgctgtctcttgcccgggaatcggaggaaccgttggcctgaccggcttttcgggctgctggaagtcgaactggaacccgccatcgctgttggtcatgacatctccttgggattaagcaaatggccggcatccgccggccgaatggtacgtcgcaacgctcagtcgtcgatgtgcgcgcggtagaaattctcgtaggaacggctcggcgtcggaccccgctggccctgataatgcgagccggtgcccttggagccataagggtgctcagcggacgagctcagctggaagaagcacatctggccgattttcatgccaggccatagtttgactggcaacgtcgacacattagacagctcaagcgtaatatgcccctcgaaaccggggtcaatgaagcccgcagtcgaatgggtgagaatccccaatcggcccagtgagctcttgccttccagacgggcggcaatggacgggtccaacttgacgtattcccacgtggaacccagtgcgaactcgccggggtgcaaaatccacggttcgtcgggagccacctcgaactgttcggtgagcgcgccttggttttccgccggatcgacataggtgtaggcgtggttattgaacaaacggaagtaccgatccaatcgcacgtcgatggaagcgggctgcaccatttcgggggtccacggatcaagtgagatatgacctgcggactgtgcggcgagaatgtcgcggtcggacagcagcatgtgaaaaactccttgggcaaataaatactgccttcaagtctagcgccttgggcggaaacgtgagaggctcctcacgcttccgcggtccatcaatcgcaagtattctcaggtttttctcagagaaacttagaggtagacccagaaagcagtggttatataaaagatgtcagcggaaagctgatcaggagccgcagcagttcccgacaattgaaccccctttcttcttctctctcctttctctccccggcgggcaaccgccggggttctttttgtgccctgaatcattcccccgaatgaccgccattcccaagccatagcggtacactagctgtgtaatcggcaggaaggggggcaccgatggcccgcaacgatgaggactacgatttcttcggcgatggtcagtatgacgattcgcgcagctcacgtcgtgcacagaatcgacgcccatccaggcgggatgccggccggcgattcgccgctacaaaagccagcagcccaacgtcgatattgtgccgcagacttgccgttgtcagcggactgctagccgtcgtggtatcggccacctcggcggttcatgagatcgcgccttacgccatttcctttatgacggcagtgccaggacgatacattgcgttgatggcggcggtgcttatcggcatcaccctgattctggtcatcgctgcgcgagtcaccatgcctcggtacgccactcacgggggagtgggcgcgggcggcatcatcgcactggtgtgcgccatagtttgcttggttatcggcgtggccgtgggcgtattgttcccggaaggactgattcagcagtcgaacgacaaggcacccgtcgaagataccgcacagatggagcaaggcatcgaacaagctgccggcgcgtgcaaagaaggatggcaggggcttgatacgggcggtttgccgggcatcaccaccgtacagatgtgcactgatccgagagtggccttcgtatcctttgaatcggaatcgtccgcagccatcagccgggcacctatcgaaagcaagatttccgaactgctgagccaatacgctgataatgagcaaacgaaaggtgattggcgattgctgaacggcaaacgctggatggtgttcggcgaggccagcaagatgaccgcactgcagcagcagtggggcggcgaacttgagacaatcaccgcagccgcagataccgcagacagcggtaacgcctgacagattgccggtatcccttgaaaagtcccaaggcgattcggcgcggattacccaatgtgattgaaatcatggtccatcgttttccgcacagcgcgcaagacctctatattggaatggtatgagcaaagaagcgaatgccagccagcctctgatcggccgcgaatccaccactgtgcccggacgttttggcgagccactcaccgtggagcacagcgtcacctcgcgcggcggcttcgaccagcatgccgcgcatccgctgttcctgtgcctgcacggatggggatccagcgaagaagacatggcggacatcatgcgcctcatcgctccatataacgatttcgtggcattgcgcgggccgctgacactcgcgccggcccgtgagggcagtctcgaccccggcaactacgcgtggttccacgatgccctgcctatcggcgatgatcgtgactacgacgcgtatgccgccgccacagcagtcgaccgatgggtggccgacaacattcccgccgaccgtgacgtggtgccgcttgggttttcgcaaggtgggctggtcgccgtgcatttgttgcgtatcaatcccgagcggtaccgggccgtcgtctccctgtccggcttcaacgcacccggtcaggtgcccggcacggcccccgccgactctcgcctggccgattatgatatccccgtgttctatacgtacggcaagaacgatggcgtaatcccaaaatacgaactgttcgccaccgccgcttggctggaagagcatacgtggctgaaaaccaagagctaccacggtctggatcacaatgtgagtcttgaggagttcgccgatttgcgccagtggctacttgacaacgacattacctctggcgtgctgtagtcagccgccatcactggaattggcgcggccgtcgcagcaatcggacatcgagggcgcttgtggctgactcggtcatagactgttctcccatgagcgaagtgagcactgcaagcactactgcacatactgaagagaatcatgtggacgagtccccgcgcggcatcgcggttatggttgtggtgggcgtgctggtcgggctgttgtccggactgttcggcattggcggcggcaccatcatcgtgcccgcgctggtctggctcggcctgacccagcggcatgcggccgccacttcgatgttggcgattgtgcccacctcggtgtccggcgttctggcctatgcggttgaaggcaatgtggattggattgctgcgctgctgatgttcctgggcatgttcatcggcggtcagattggttcgctgctgttgtcccgactgccggaagtcgtgctgcgctgggcgttcgtggtgtttatggcgtttatcatcgtgagccagcttatttttataccttcgcgtgattcgtcaatcgaatttaatctggttactgtcttgctgatgattgttttcggcgtgctcgccggtattttggctggcttgctgggtgtgggcggtggcgcgatttgcgtgccggctttgtcgatcctgtttggcgcgtccgatttgatcgcgcgtggtacttcgctgttgtccatgttcccgaatgccatgaccaccaccgtggccaatgtgcgccgcaaaatggtgcatgccaaagccggtctgattatcggcattgtggcggcactgaccgcaccgctgggcacttggattgccggggccatgagcccgcgtgccggcggaatactcttcgcaacctatctgacggttctgctgattcgcagcatctgggtagccctcaaagtcacacgggaatagcaatccccaacttggctcccctcagagaagggagccagggaaactagatgccggaatcagcgtccacttgcataacgtagatgttgcgcctcagggagcgggcttgggctcggttgatgtcgccggcttcgtacatgtcctgaatcataccgagttcgataccgtagctctcgcgctttacgtcctcgacctgcgtgatggtttccgtagtgccgctcatggtcggacgtgcctgcaatgaagcctcggcacgacgataatccagcaacagtgccgaacaatgctcggtgttgtacgtatcctggcccatctcgtcaataagccggccgataacatgatgaatcgcctcgacctgcagttcgcgggtgcgcgcgaaaatctggtcctcgctcaccaatggtgtggtgtggcgaatcttggacaccgtgcgtttggcgtaattgctcatctgccgctggaacatgcgtacacgaccgcgaatctgcgataccgcgtgccccgaagtcggatcagtggaagtgtgacgcagcgtattcataatctggtcaagcatgcgctcgcaggcttcgacgttcagctcttgcgtggccgtatccgccgccggatgtgctttggtgtcggcaagccggtcgcgcacgaattccttttcccaatgcagcgcttcgatctgcaattgctcgaatccctggggatcggtatcgccgatgcgctgctgcaatcgcccgatgcgcttggtgtactggtcgattaccatcagaatcgcacgacgattctctggcgtgatgcgtccggtcaattcctccaccgtggcgcgtaacacatcgatggtcaccggaattatttccgcgctgggatccttgccacggttcggagccaatagcggtaacaggaagttggccagcagcaaggtcacgataatcacgcctgacgcaatgaaaatcagctcgtcacgcatcgggaacggcgcaccgccggcaatgtaatacgggatggtgaacatcaatgacagcgtgatggttcccttggggccgccaaaggtcatcactgcggccgagcgccagcgttcgggtgtcattttgcggcgctggccggagattgtatctcgcgcaacgcgcagcatggccgcaatccagaagaatcgaagcgcgattaccaccagagtgaccagcagaataatgccgatcagcgcgatattgctgatatacgggtcagaccagctggccatcatggcgcgcggcagctgcatgcccagaagaatgaacaccgcaccgttgagcgagaaactcagcacaccccatactgaagtggaaacgatattcgtgcgtgccacattcggccccacgccggtgcggtcgaatcggatgaacaggccagcggccaccaccgacagaatgccggacacattgaattcctccgcgcccaaatacagcaggaagggcaggaacagttccatcagaatacgtgtggtagtggtttcccagccgagggatcgcacggtctcgaatagccagttggccgctgctgctatcaccaggccaaataaggtgccgccaaagaaggagatcacgaattcgccggcggcctgccccacggcgaattctccagtgaaggcggcggccagagcgaactggaagccgacgatgccggaagcgtcattgaagagtgattcgcctttcagcacgctgcgctgacgctgcgtcagcgaggcttctttaccgagggagctgacggccaccgcatcggtcgggccgagtgccgcgccgagtgctaaggctgaggctaaggtgatggacggccagacggcatgcaaagtgaatccgaccgccgccatcgtgacgatagccagtccgatagccagcgataggctcagatccagcgttttcagcaacgccgacttatcgatttcgtgggcttccaaatacagcaatggcgcgataaacagcaccatgaacagttccgggtcgagcgttgcatccgggaaaaacggcagatacgtaaccagcacgcccagcacaatctggaccagcggcgtggagactttgggcacgaagcgactgacaaacgagctcaccaccaccgccgcaatgatgcataggatgagctcaaataccgccatgttgccgccttctcccttaaatttttctccaccaaaagtatatgggaaccatgaagaaaacgttaagcttgcggccgattatgcacatcatgagacgatatgagaaaaggcatacactcgttggtatggaatatgacgaggcgatgcgccgtgcactggaactggccggtcaggctgcagccgctggtgacgtaccggttggtgcggtggtgctggatgcggccggccagattgtcgggcgcggatacaacacgcgtgaggctgatggtgacccgcttgcccacgccgaaatcatcgccatgcgtcaggcggcccaagccttgggcgcctggaatctcgccgattgcacgctggccgtcacacttgagccgtgcccgatgtgcgcgggtgcctgcatccagacccatatcggcaccatcgcgttcggtgcctgggatcccaagctcggtgcatgcggttcgatttgggatattccgcgcgatccgcatatcggccatagtcctgaagtgcacggcggcgtgttggaaggcgagtgtcagtccatcctgactgatttcttcgcccagcggcgatagacacggacgcattacttacctcacgcaaccaacacgcggcaccaaggcaacatattccatttcttctaccatcgaaaccagtagtgcaatgccaatccacacacgtcgaaggagacaatatggccgagaacacctcgactttcaccggtgccgccgctgacggtaccgcactcaccgccgtctacctgacccagcccgccgccaatgtggcgatcggtctggtgtttgccggcagcgacctgccgcacatcgtccactggggccgcccgctggccaagcccgacaccctgctggccgcctatgacgccctgaagccgcagcgcgtgtccggcgcgctcgacgacaccgcttggccgtccatcctgcccacccaggccgaaagctggatcggcgagcaacgcgtggtgctgcgccgcgccggcgtcgagctcttccccaagttcaccgtgaccaacatcgagaccggcggcgtgctggaagccaccctcgatgccgtgtccggcgaaagctacaccgatgtggccggccatgcccgcgccaccggcccggcccgcgtgcccggcgtcatagtcaccgcgcgcgatgaggagcagggcgtggaagtcgaatggcaccttgaactgctccccggcggcctggcccgtcagaaggccaccgtaaccaacctgttcggtgcagacgccggagcccagctcgagatcggcaagatcgagcttggcttcccgctgcccgaatccgccggcgaaatcctcaccaccaccggtcaccatctacgtgaacgcagtccgcagcgccagccgctgaccgtcggccgtttcgaaaagccgcagctcgctggccgccctgacttcgacgcatccctgctcctgaccgccggcgtgcccggtttcggcttcgagcatggcgacgcctattcggtgcacgtgggctggagcggcaactccgtgctgtccgccgaacgtctgccctacacaaccggcgtgatcggcggcggcgaactcctgttcggcggcgaagtgacgctcgccggccccggcgaaggccagaactcctacgacaccccgtggctgttcggctcctatggcgatggcctcaatgagatcgccgcccgcttccactcctacgcgcgctccctgcatccgcgcctgttctcgcacggccgtccggtgatcctcaacacgtgggaagccgtgtacttcgaccacaacttcgatacgctgaaggcactcgccgacagggccgccgactccggcgtggaacgattcgtggtggatgacggttggttcggttcccgccgcgacgacacctccggcctcggtgactggcagattgcgcaggacgtctggcccgatggcccgaagtccctgaaggcgctcgccgactacgtgcacgccaagggtatggaattcggcttgtggttcgagccggaaatggtcaaccccgattccgatgtggcccgtaaccaccctgattggattctctcgcccaccgctggccgactgccgctgcagggccgtactcagcaggtgctcgatctgaccaatccggatgcgttcgactacatctacggctgcatggaccagcttgtcggcgagcttggtatcgactacatcaagtgggaccacaacaagctcgtcaccgagcccggttcccgccgctccggccgcccggccgtgcacgcgcagacccttgccgtctacaacatcttcaagggcctcaagaccgcgcatccgggccttgagatcgaaagctgctcctctggtggcggccgcgtggatctcggcatcctagagcacgccgatcgtatctgggtctccgactgcgtggacccggttgagcgcgcggacatccagcgctacacctcgctgctggtgccgccggcgatgatgggcgagcacgtgggcgccagccccgcacactccacccagcgcgccaccagccaggaactgcgcatggccatggcgttcttcggccacatgggcatcgaatggaacctgttgaaggagccggacgaggcgctcgccaagctggccgtgtgggtggccgaattcaagaagcaccgcgactggttcgccatcgacacctgtgtgcacgccgactccaacgatccggccgtgcgtctggacggtatggtgatgccgaaccgtgacgccgccatctaccgcttcacccagctgaccaccagccagacctatccggccgcgcccgtgcatctgcccggacttgaccccgagcgcacctaccgtgtcagcccgcttgacccgagcttggatttgaccggtctgaccaacggccagagcactctcggctggtggaacgaggaaggcgtagtcctgaccggcgaagccctgcagcgctacggcattcgtcccccgtccctccacccccagcaggcagtattgctcaaggctgtggcgttaagctgacagcctagtaggctgtcagtagccacggcctgagcgaagcgacagctgagcgaaggtgggattgagccttgccgataggcaagtccgtaattgctggtcgtggcggagtaactgtggcgaagcaacgttcttggctcccctctctgaggggagccaagaacggcctacccaatatgcttcacaatcacgcgactggcggcggctttggcccagagctgccagtcgtggttcataatcgtgaacttgaccggctgggtctggctgtgacgatagaaacgaatgccgtcacgcagcgaatcggtgccgagcttggccaaaaacgcggactccccggcaatcatcacatgcccgggcatcgcgatgttcgccaccgtagccaccagcgatcccaagcgatagcacgtccggttcaccaactgcgtggcctgcggcacgcatcccttggcatcgcgcacaaagtcctcaaaactgaccgcgcgacccacaatcgcagagtactgttcggcgatcgaatcgtcagtcaagcattgtgaacagccgatatgtccgctggtgcagcgcggcccctccggatcgataagcacgtggcccaccagaccatagctcttatccgggtactgcactggcttgccgttcacggccagcgaataaccaacacccacgccgatggtcaccacggcgaacatatccacgccgacacccggcccgaaccaggaggcatccaccagcagagaatcgatatcattgaacaccccgcacggcagaccggtcgcctctgtgaccatcgttcccaagtccgtggccccgtcccaatgcaggaacggcgcgaacgtcacaatcgaatcgtcgaccacatgcccacctaccgcaacgcccaccgcagtgggggagggcaacccggaagagacgatatcggcggaacattcgcgcaccagccgcgtgatggccgacaccacatactcagccgactgatccgccccgatcggcacctcgtgccggccggacaccacctcgccatgcgcgttcaccgcagcggccacaatcgacatcccatgaaccttgacaccaatgaaggtgcgtgcgttcgaacacaacaccagcgaagtctgcgggcgtccgcgacgatccgaactttcccttggcgtgaatcgctcgggcagcttgcctgacgggctggcctcggccggaagctcctcgatcaccccggcgtagatcagatcgctggtgatgcgggacaaggccccttggctcagtcccagcatctgtgccaacgtagtgcgggctatcggcccgtattgggcaattgccgccgccacgcgatgcgtatgctcggatccggaaaaccactgtggaatcgcgttggtatcagacatgcaagccccccctcgctgtatttattgcgttaatcacaaaataccgcgctttttgttgcttgcgcaagtgggctcgctggcgctgggaatgaaatggccgaaccgttatcttagaaagtggaagaaccgccggcatcgaagccggaggaaaagaaagataaaggagtcaacaattatgctgtccgattccccacattcaacgcctagactgaagcgtctggccgtacgcaccgccgccgtggtgtgcgcgattgccgtcggcttcggtctggcaggctgcggctccagcaccgcaggcaccgtcacgctggatttcttccagttcaagtccgaggccgccgaccagttcaagtccatggtcgccgattttgaaaagcagaacccgaccatcaaggtcaatatcaacaattccgccaacgctcagaccgatctgcgcacccgcttcgtgaagaaccgcgtgccggacgtgatcaccttcaatggtgacatcagctttggcaacttcgccgcgtccggtgtcttctacgatttcaccgacgaacccatcgtggataccctcaatcccggcatggtcgagatcgccaagaatctggtgcagaccaccgattcctccaagaagcgcctgtatggtctgccctttgccggcaacgcctccggctacatctacaacaaggcgctgttccgcaaggtaggtctcgacccggagaacccgccgaccacgtggaccgagttcaccgacatgctcaacaccttcaaggacgccggcatcaacccgctgcagggttccgtggccgacgcctggaccacccaggcaccgctcgcctccctggccggcacgctggttcccgaatcgaagtacaccgagctcaagcaaggcaagaccacgttccaggaactgtggaagacctcagtcgagaaggaatccgagctcttcacctactccactgcggacaccggcgtcacctaccagcagggcacgcagaacttcgcccaaggcaaggccgcgatcatcccgctcggcacctacgccatcccgcagatcctgctgatcaaccccgatatcgaacttggtttcgcccagatgccggccaccgatgacgccagcgagcagatcctcaccgccggcgacgacgtgatgctcaccatcggtgcgaacaccaagcaccccaaggaagcgatgaagctcgtcgaattcctcatgcagaaggatcagcttgacgcctacgccgacgcccagtccgccatcacgccgctgaaggacacctacttcggcaacgatgcgctggaaaccgtgcgcccgttcttcgaggaaaaccgactggccgacttctgcgaccactacattccttcgtccatcaacatcggcggctacctgcagaccatggtgacctccggcaacaccgaccgtttcctgaaccagatgcagaccgaatgggacaaggtccaagccaggaccttcgagtgatcggtaggagaggagaacatcatgtcacacgcaaccgcaaccaagaccgctgccaagaaacccgccaagaagaaggtctccgccttctccacccgcaaagtggaccccgcttactactggatggtggttccggcggccattatcttcgccttcttcctgtacctgccatttcttgatggcgtaaagtattccttcaccaactcgcagggctacggcgattacaagttcatcggactgaagaactacatcgccctcttccaggacaaccgcgtgggccacgcctacctgttcacgttcctcatcgccatccttatcacggtgctgatcaacgtgattgccctgttcctgtcggtgctgttgaactcgaagatcgccttcaagaatggcttccgagccatcttcttcatcccctacaccctttccgtgctggtcatcggctacgtgttcaagtacatcttcatgaaccctctgcccgagctcggtaaggcgctgggcatcaagtggctgtccacctcgctgttgaccaatgagcagcttagctggatcccgatcgtcttcctcgccgtctggcagggcatcgcctactcggtgctcatctacctcgccggcctgcagaccatcgacgatgaaatctacgaggccgccgccatcgacggcgtcaatgcctggcagaagttctggaagatcaccttcccgctgattggaccgttcttcaccatcaacctcgtgctgtccatgaagaacgcgctcggcaccttcgatcaggtcgtcgccttgaccgagggcggcccgaactcctccaccgaaaccgtcacctacctcatttggaagggtggcctgaccggtggcgagtacgcctaccagaccgcaaacgccgtgctcttcttcatcgtgctggcgatcatcgccttcgtgcagctgcgcatctcccgcagccaggaacagatttgatttaggggaggataagaaatgactactgcaacagttaccccgtccaagtccggcaagcccgccaagttccgcagggaccacaagatcaactggtggctgaccgccgccgtggccgtgctgagcctgaccattctgatcccgctctacttcaccatcgtcaccgcgctgaagactccggccgaggccggcaccttcgccctgcccacctcgtggcagtggcataacttcgccgacgcctccgccaaggtcaactacccgaaggccgcgctcaactccgcgatcatcacggtggccgccgtggtgctcaccctgctgaccaacaccttcgtggcctacgccgtggcccgcaacatggacaagcgcttcttccgcttcctgtactacttcttcatcgccgccatgttcgtgccgttcccggtcgtcatgctgccgattgcgaagcagatgggctccctgcacctggacaaccaggtcggcctgatcatcctgtacacggtgctcggcctgggcacgaacctgttcatcgccactggcttcatccgttcgattccggtttcgctggaagaggcggcccgaatcgatggcgcatccacgtggcgcattttctggaccatcatcttcccgctgatgagcccgattaacgccaccatcgccatcctgaccgcactgtgggcctggaacgacttcctcctgccgttgatcatcctgaccgaccagtcgaaccagaccatcccgctcgcccagtacgtcttcagctcgcagttcgccaccaactatccgatggccttctccagctacctgatggccatggccccgatcctcatcgtctacatcttcgcccaaaagtgggtcgtcggtggtgtgatgaggggagcggtgaagtaaaacagcgcaggcgctgctttacttcaccgcgtcgagcgagacgagccgattaaggaaacagccccgtgggctgtttcccggcccgggcggccggataggtcgcgtactcgcgaggtcatgttgggtctggccgtaggccagtcctgaattgcaggactctgtgaagtaaaggtccgcttccacccaagcctcctccggctctcaccggaggaggctcttctgtcctgttgccatactggaaaccgccacaataaaggcgacggtcggttgatgtggcggtggcgcacaaaggtcatgtggttttgctcgttgtgcgaatgaaaaagtgacgaaaccgtacggcttacggtgcaattgaacgcatctgctgtgtcgccgtgccactggcttgtcccggtccacatatcaaccgtttgacgcgcgaaccgggacagaatccgctgtcccggttcgcggtttcgggcgattttcacgaaccgggacaattttcattgtcccggtatgaatgtcaatcgttttatgtgaaaaccgggacaacatgttgattccgggatcggctctattccgccgattttgtattacggagcatatgaactgcggagattggcttgtccctgtttgtaaaaaaggacaaaaatcgcgaaccgggacagcggattctgtcccggttcagacggcaatcgattgacatacgaaccgggccaacgccgaagtccggagcggttcccgaggcggggtttgcttgaaatccggtgtgccagcgaaatccccaccagattcccgcaggcgtgtcaactaaatcatctatccccgcaccagtgggttcaagcagacaatccaagcgcgcccgaagttgctcttgcgcgtcgcaatcagaagaaccgttaatatgtgagctgccgcaggtcaggtagattatggtggcgaagtggcggcggaacaagcgggcgagctccttcataggttcgagcctcgagtgcatcatccacgagcacaggcgatatagccacacccacgcctcgaacaggagcatgaaccctctgccgggctcgaagccgatcgtgatgtgcggctcccgcccgtcgccgtcggcgtcacggaagtccgcagacccgaccctccaaggcgaccgcagccgaagcgcggcggtgaacaggtgagaggcatccatgcctccaacctacccgaccaacatcaccccacggcacagtcacccaccacaaacagcgaaagggcccatatgttgctaaatagcatgtgcagcttatgagaattgagccgtagcagtgccttccggctctttgcagtttttgtttccggcacaccaacgcagttccccaatggaaatgtaattcagcgctttttagactatgagcaacaggcaatgtagaccataaataatggaggagccaacgatgaccacttcacaacgcacagtaattccagattccatccgcaccaacggtgccaccccaaatccgtggtggtccaatgcggtcgtttaccagatttacccgcgttccttccaagacaccaacggcgacggcctcggcgatctcaagggcattacgtcacggctcgactatctggccgacctcggcgtggatgtgctgtggctatccccggtatacaagtctccgcaagacgataatggctacgatatttccgactatcaggacattgatcctctgttcggcacactcgacgacatggatgagctgctggccgaggcccacaagcgcgggctcaagatcgtgatggatcttgttgtcaatcacacttccgatgaacacgcctggtttgaagcgtccaaaaacaaggatgatgagcacgccgactggtattggtggcgtcccgcccgtcccggcaccactgccggcgagcccggtgccgagcccaaccagtggggctcctactttggcggttctgcatgggagtattgccctgagcgtggcgaatactacctgcatcagttctcgaagaagcagccggacctcaactgggaaaatccggctgtgcgccgcgcggtatacgacatgatgaactggtggcttgaccgcggcgttgacggcttccgcatggatgtgattacgctgatttccaagcgcacggacctgtctggcaagctgcccggcgagtacggttccgagctggacgatctgcccgtgggtgaggaaggctattccaacccgaatccgttctgcgcggacggccctcgccaagacgaattcctggccgaaatgcgccgtgaagtgttcgaaggccgtgagggcttcctcaccgtgggcgaggctcccggcgttaccgcacagcgcaacgaatacatcaccgaccccgccaacggcgagctggacatgctcttcctattcgagcacgttgattttgactgcgaaggcgtcaaatggaagccactgccacttgacctgccgaagctcaagagcattatggccggttatcaagcggccgtgaagaatgcaggctgggcaagcctgtttactggtaaccacgaccagcctcgcgtcgtttctcgttggggtgatgactcctcggaggaatctcgtgtgcgttcggccaaggcacttggcctgatgctgcacatgcatcgcggcaccccgtacatatatcagggcgaagagctaggcatgaccgacgcccacttcacgcgcctagaccagtaccgtgacctcgagtccctgaacgcttaccgtcaaagggttgaggaagccaaagtgcagtcgcccgaatcgatgttggcgggtatcgccgcgcgcggtcgtgataattcgcgtaccccgatgcaatgggacggctctgtctatgccggtttcactgcgccggatgccgctaaggagccatggatctccgtcaatcccaaccatgcggcgatcaacgcggccggcgaattcgacgatccggattcggtatatgccttctacaagcagctcatcgcgctgcgccacgacatgcctgtcgtggcggccggcgactggcatctgctcgatgcggatgacgcgcatgtctacgccttcacccgcaccctcggcgatgagaagctgctggtcgtggtcaacatgtccggccgaaccgttgatctaccgcgcgaaaccgccgaactggccgccgccggaatcaccgagtcgaacgtggtaatcagcacgtatgatgccccgcacgccgtggcctccctcgccaaccgtgagctcgatccttgggaggccgccgtcattcagctgtagcgattggagcgattgtagcggattgagtacctttctccgttcacagagatacttcagggctattgcgaaatgctatccgccttgaaagaggtaccgtaacgtcaaaaccccgagtataagcgttgaaaaatcaaggcttatactcggggttttcgatgctcggtacccctgtgaaaaacagatagctgtctgcaaaaggccgaatgtacctctgtgaagcgagatagctggtgtctctcggcattgtggtgcttacaatggaaagctatggaacaaaaggatgttttgaaggcgctgcaacgtgatcatgcagccgaactgaagctggccgccgaacgactcaaaggcactgcccgccacacggagatcattccttctccggtgctgagcgagatgaccggccatgagattctcctgaagccggaaaacctgcaggtcaccggatccttcaagatccgcggtgcctataacaagattgcttcgctcaccgaagagcagatcgctcacggcatcgtcaccgcgtctgccggcaaccatgcccagggtgtggcctatgcggcccgcgagcgtggagccaaggccaccatctgcatgccgcagatcaccccgccgctgaaggtcgatgccaccaaggcctacggtgccgacgtggtgctgtacggcgatgtgttcgatgaatccgccgcccacgctgctgagctcgccgacaaggaaggcatgatttacgtgccgccattcgacgattacgaagtcatctgcggccaaggcaccatcggtctggagatccttgaagacgtgccgaacgtcactgacgtggtcgtgccgctcggtggtggtggcctgggtgccggcgtggcgctcgccatcaagacattcaagcctgaagtgcgcgtaatcggtgcgattccggagggctcaccggcctggaaggactcgctggccgcgggtcgtgtgtctccggctgaccatgtggttacctccgccgaaggtgttgcggtcaagcaccccggcgacctgcccttcgctctgattaacgagttcctggacgatctggtcaccgtcaccgagcgcgacatcaacgaaatgattctgctcatgctcgagaagcataagctggtggtcgaggcggccggcgccgtttcgctggctgcgctggaacacctgaacctgcgttcgcgcaagttcgccgccgccaccggcccgcacgtggtggttccgattatgtccggcggcaatatcgacaccgtgaccatgggtgcggtgattcagaaaggtatgatcgcccgcggccgcatcatgaacttcgaggtcgagctgccggatactccgggccagctcgtcaaggtggccaccctgcttgccgagcagcgcgccaacgtcattcagcttgatcacgaccagttcaaggcatccggccactacaccaacgcggtgtctctcggcgtcacggtcgagaccaacggccccgagcacatcgaccgcatcctcgcggcactcagggaagccggattccagcccaagcgcatctactgattccaataccgctggcgggaagccgcgcagaagtgtgctccaatacctcccgctggcgggaggtggcgcaaaagcgccggtgggtggttaaccgacaatcatcagttgcttaacccacccaccggcgctttcgttatgctgagggctacttgttctccgcaatcgtctcgtccaccaacttcggcagggcaacggcgatatcctcatgaatcaagcggctcgcaagatggtcatattgcgtgtgacccatattcataatggtgatgggcacgcccgcctgcgcggccaccggcacaatgctcgccgccgggtacacctcaagggtcgatccgattacccatagttcgtcggctttggtggccagactgtacgacttctccatcgcgccgtccggcaacgcctcaccgaaatacaccacatcggttttgataatgccattgcacggcatatcgccacgatacttcagtttgcgatggcaatgtgggtcgggctcttcatccaaacgggccatgatgtccgccgtggcatattcctgatggcacttcatgcaatgcgaggtgccgatagtgccgtgcaggttcacgatgacgttgtcgctgttgccggccttctcatgcagcgcatcgaagttctgcgtggccagcagcgtcagcatgccggcttgttccagcttgaccagcgccttatgcgcagtgccgggctgcgcattccatactggcgattccttttgccagcgccaggagtactcgcggtcctctttgttgcgcaggaacagatcgatgtcgtaaacgctcatttggtcaggatgcttggtccacacaccgtccggaccgcggaaatcagggatgccggcggacgtggaaatgcccgccccggttaatacagcaatcttcttggtcataactacaggtatacccgcgattcatgaacgaaatccgatgacggagcgctgtcatgcgccgattgtgcgccggcagtgtggttgccgagagatgaacgcagggccgacaagctgaaaactctcgcgacacgccagccgaatagtggatttgatgcttttcagaaacatttgaggggttaacctagcctcatcagagcaaagtgggctctgtgcgacacgccgagggagccgcgctgttatgccgattcctggggtttttgtgcgccttgatttgcgtgaatccggacatgcgtgtaagttatttccttgctgccgctcagcgagtggttctcctccggggagctgcgaggtgggtgagtggtggtggtttgagaactcaagagcgtgtttgtactacttctttatagtcaatgattgccagttcattcctcgcctgattgcctgtcgtggtggttgggtacccgggagggtttgatgaggggtgaggttttttgagggcgtccttccttaaggacgtgctcgtcaattttttgttttgagagtcatctattcggatgcttttcatgaagtttttttttgtggagggttcgattctggctcaggatgaacgctggcggcgtgcttaacacatgcaagtcgaacgggatccaccgggctttgcttggtggtgagagtggcgaacgggtgagtaatgcgtgaccgacctgccccatacaccggaatagctcctggaaacgggtggtaatgccggatgctccagttgatcgcatggtcttctgggaaagctttcgcggtatgggatggggtcgcgtcctatcagcttgacggcggggtaacggcccaccgtggcttcgacgggtagccggcctgagagggcgaccggccacattgggactgagatacggcccagactcctacgggaggcagcagtggggaatattgcacaatgggcgcaagcctgatgcagcgacgccgcgtgagggatggaggccttcgggttgtaaacctcttttatcggggagcaagcgagagtgagtttacccgttgaataagcaccggctaactacgtgccagcagccgcggtaatacgtagggtgcaagcgttatccggaattattgggcgtaaagggctcgtaggcggttcgtcgcgtccggtgtgaaagtccatcgcttaacggtggatccgcgccgggtacgggcgggcttgagtgcggtaggggagactggaattcccggtgtaacggtggaatgtgtagatatcgggaagaacaccaatggcgaaggcaggtctctgggccgttactgacgctgaggagcgaaagcgtggggagcgaacaggattagataccctggtagtccacgccgtaaacggtggatgctggatgtggggcccgttccacgggttccgtgtcggagctaacgcgttaagcatcccgcctggggagtacggccgcaaggctaaaactcaaagaaattgacgggggcccgcacaagcggcggagcatgcggattaattcgatgcaacgcgaagaaccttacctgggcttgacatgttcccgacggtcgtagagatacggcttcccttcggggcgggttcacaggtggtgcatggtcgtcgtcagctcgtgtcgtgagatgttgggttaagtcccgcaacgagcgcaaccctcgccccgtgttgccagcggattatgccgggaactcacgggggaccgccggggttaactcggaggaaggtggggatgacgtcagatcatcatgccccttacgtccagggcttcacgcatgctacaatggccggtacaacgggatgcgacgcggcgacgcggagcggatccctgaaaaccggtctcagttcggatcgcagtctgcaactcgactgcgtgaaggcggagtcgctagtaatcgcgaatcagcaacgtcgcggtgaatgcgttcccgggccttgtacacaccgcccgtcaagtcatgaaagtgggcagcacccgaagccggtggcctaaccccttgtgggatggagccgtctaaggtgaggctcgtgattgggactaagtcgtaacaaggtagccgtaccggaaggtgcggctggatcacctcctttctacggagaattcagtcggatgttcgtccgacggtgtgcgccccgcgcgtcgcatggtgcgatggcggcggggttgctggtgtggaagacgtcgttggctttgccctgccggtcgtgcggtgggtgccggggtggtatggatgcgcttttgggctcccggatcgccaccccaggctttttgcctggcgcgattcgatgcccgtcgtgcctgggggccggccgtgtgccggtgcgatggcgtggcggtgcgtggtggcttgagaactggatagtggacgcgagcaaaacaagagtttttgaatctttgttttgctgttgatttcgaatcgaactctattgttcgtttcgatcgttttgtgatcatttttagtgtgatgatttgtcgtctgggaatttgctagaggaatcttgcggccatgcactttcgtggtgtgtgttgcttgcaagggcgtatggtggatgccttggcagacaggaccgatgaaggacgtttgaggctgcgatatgcctcggggagccgccaacagggctttgatccgaggatttccgaatgggggaacccaccgaccgtcatgggtcggtaccggcttcggccggggggtacgcagggaagtgaaacatctcagtacctgcaggaaaggatattccgtgagtagtggcgagcgaaagcggatgatggccaaaccttgcgcgtgtgatacccgtcgggggttgcgcgcggggtgttgcgggatcgcgtgcgccggctccgacgggccggccggcagttgcagaaaaccatgtgtcaggggaaccgggttgaataccgggccgcagagggtgagggccccgtacctgaacgcgcatggtctgccgatcgcgtctcccaagtagcacgggtcccgtggaaccccgtgcgaatccgcccagaccgttgggtaagcctgaatattcctgtctgaccgatagcgaacgagtaccgtgagggaaaggtgaaaagtaccccgggaggggagtgaaacagtctctgaaaccgtgcgcctacaatccgtcggagcccttttgtggggtgacggcgtgcctatcgaaaaatgagtctgcgagtcagtggcatgtggcgagcataacccgtgtggggtatgcgtagcgaaggcgagtcttaaaaggcgtttgagtcgcgtgtcctggacccgaagcgggatgatctagccctgagcaggttgaagcgcgggtaagaccgcgtggaggaccgaacccacctgggttgaaaaccggggggatgacttggggctaggggtgaaaggccaatcaaattccgtgatagctggttctctccgaaatgcatttgggtgcagcgtcgggtcattacgtcccgggggtagagctactggatgcttgcgggcccgtatcgggtaccaacagcaaccaaactccgaataccggtgacgcgtatcccggcagtgagtcggcgggggataagcttcgtcgtcgaaagggaaacagcccagaccgtcgtctaaggtcccgaagcgtgtgctaagtgggaaaggatgtggagtcgcatagacagccaggaggttggctcagaagcagccacccttgaaagagtgcgtaacagctcactggtctagtggttccgcgccgacaatgtagcggggctcaagcacaccaccgaagacgcggcagtattttgtactgggtaggagagcgtcccatgaggggcgaagcggccgtgtgaacgcgccgtggacttcatgggagtgagaatgcagacatgagtagcgagagacgggtgaagatcccgtccgctggatgaccaagggttccagggccacgttcatcgtccctgggtgagtcgggtcctaaggcgaggccgacaggcgtagtcgaatggatgaacgggtcgatattcccgtaccggctttcagccgccaaaaccgaggcttggagtactaacctccgggtccgggcttactgctccttcgggggcgggatgccctggcctgttgggaccgatccttgtagtaggtcagcgcaggagtgacgcagaagggtagccggccgcggaggtggtcttccgtggtcaagcacgcagggcgtgggacaggcaaatccgtcccgcatgggtccgaggtgcgatgatgggggccttatggcccgatatccggtgatcccggctgccgagaaaagcttcggcgtcaggctcaaagccgcccgtaccccaaaccgacactggtggtcaggtagagaataccaaagcgatcgagcgaatcctggtcaaggaactcggcaaatcactcccgttccttcggtttaagggagacccccgatggtgaacacgcttgctgtgggagcttttgggggtggcacagaccagggggtagcgactgtttaccaaaaacacaggtgcatgcgaaggcgcaagccgctgtatatgcactgacgcctgcccggtgccggaaggttaagaggatccgtcagccttcgggtgaagcggtgaattcaagccccggtaaacggcggtggtaactataaccatcctaaggtagcgaaattccttgtcgggtaagttccgacctgcacgaatggcgtaacgacttccccactgtctcgaccaggagctcggcgaaattgcagtacgagtaaagatgctcgttaagcgcagaaggacgaaaagaccccgggacctttactataccttggtattggcattcggtgtggattgtgtagcataggcgggaggccgagaggcgcggtcgccagatcgcgcggagccgtaaggtgaaataccgctctgttcgcattggatgtctaacctcgaacagtcatcctgttcagggacagtgcctggcgggtagtttaactggggcggttgcctcccaaagagtaacggaggcgcccaaaggtccgctcagcccggttggcaatcgggtggcgagtgcaagtgcacaagcgggcttgactgcgaggacgacggtccgagcagggacgaaagtcgggactagtgatccggtgccggtgtacggacgcggcatcgctcaacggataaaaggtaccccggggataacaggctgatcattcccaagagtccatatcgacgggatggtttggcacctcgatgtcggctcgtcgcatcctggggctggagcaggtcccaagggttcggctgttcgccgattaaagcggcacgcgagctgggttcagaacgtcgtgagacagtttggtctctatcctctgcgctcgttggaatgctgaggaggcctgcccatagtacgagaggacctgggtggacgaacctctggtatgccggttgtcacgccagtggcacggccggttggctacgttcggaagggataaccgctgaaagcatctaagcgggaagcctgctccaagataagcattccgtggaaccttcgagttcctgtagtccccatgcagaacacgtggtcgataggccggacgtggaagccccgcgaggggtggagccgaccggtactaacggacgaaaggcaacaccaacattccaacccctggcggttggaccgcatcttcctcctgcaaacgacaccagacggcaatgagcattgtctggccacaagacgaaacatcgacatatccgcgtccgctgtccggttcccaggccgccacaggccggcgggacattgttcccgaccgtataagagaagatttgcggcggccatggcccaggtgagacgcccggtcccattccgaacccggaagctaaggcctggcacggcgatggtactgcacccgacagggtgtgggagagtagcacgccgccgcatcacacttacaggaagccccttggagcacacgccccaaggggctttcgcatacccgaaacactcacgacccaaacccacacacccccacaaaaacacccggggcttctcgcatgcccggacacaaacaggacacctccggcacccacacggcaacggggcctccccatacccgtgggaccacgactgatctgtgctgcgatgtgtggatcggaccggcggttctgaatgtgctgatgccattcggtcgttggtcgtgccaaggcaagcggtacggcaaccgcatcgctaccaggcggttgattggtgcgcgactggcgagcagatagtgatccggacataatggttcttatcggtgtactggatcaatgatgattccgataattggcggtgcaccacatgcgccgtaagaggtaattcgcgacacgcccatcgaccaaaattttcaatccaattttcgacgatatctagttctagactgaagatatagacgtgcgaaacgtcgatttcgacacgccgggcgaagcctgtcgtttcaacgattctggcgtgttttttcgtgcccggtttgcgcgagtccgcgaatgcgtgtaagttatttccttgctgccgctcagcgagtggttctcctccggggagctgcgaggtgggtgagtggtggtggtttgagaactcaagagcgtgtttgtactacttctttatagtcaatgattgccagttcattcctcgcctgattgcctgtcgtggtggttgggtacccgggagggtttgatgaggggtgaggttttttgagggcgtccttccttaaggacgtgctcgtcaatttttgttttgagagtcatctattcggatgcttttcatgaagttttttttgtggagggttcgattctggctcaggatgaacgctggcggcgtgcttaacacatgcaagtcgaacgggatccaccgggctttgcttggtggtgagagtggcgaacgggtgagtaatgcgtgaccgacctgccccatacaccggaatagctcctggaaacgggtggtaatgccggatgctccagttgatcgcatggtcttctgggaaagctttcgcggtatgggatggggtcgcgtcctatcagcttgacggcggggtaacggcccaccgtggcttcgacgggtagccggcctgagagggcgaccggccacattgggactgagatacggcccagactcctacgggaggcagcagtggggaatattgcacaatgggcgcaagcctgatgcagcgacgccgcgtgagggatggaggccttcgggttgtaaacctcttttatcggggagcaagcgagagtgagtttacccgttgaataagcaccggctaactacgtgccagcagccgcggtaatacgtagggtgcaagcgttatccggaattattgggcgtaaagggctcgtaggcggttcgtcgcgtccggtgtgaaagtccatcgcttaacggtggatccgcgccgggtacgggcgggcttgagtgcggtaggggagactggaattcccggtgtaacggtggaatgtgtagatatcgggaagaacaccaatggcgaaggcaggtctctgggccgttactgacgctgaggagcgaaagcgtggggagcgaacaggattagataccctggtagtccacgccgtaaacggtggatgctggatgtggggcccgttccacgggttccgtgtcggagctaacgcgttaagcatcccgcctggggagtacggccgcaaggctaaaactcaaagaaattgacgggggcccgcacaagcggcggagcatgcggattaattcgatgcaacgcgaagaaccttacctgggcttgacatgttcccgacggtcgtagagatacggcttcccttcggggcgggttcacaggtggtgcatggtcgtcgtcagctcgtgtcgtgagatgttgggttaagtcccgcaacgagcgcaaccctcgccccgtgttgccagcggattatgccgggaactcacgggggaccgccggggttaactcggaggaaggtggggatgacgtcagatcatcatgccccttacgtccagggcttcacgcatgctacaatggccggtacaacgggatgcgacgcggcgacgcggagcggatccctgaaaaccggtctcagttcggatcgcagtctgcaactcgactgcgtgaaggcggagtcgctagtaatcgcgaatcagcaacgtcgcggtgaatgcgttcccgggccttgtacacaccgcccgtcaagtcatgaaagtgggcagcacccgaagccggtggcctaaccccttgtgggatggagccgtctaaggtgaggctcgtgattgggactaagtcgtaacaaggtagccgtaccggaaggtgcggctggatcacctcctttctacggagaattcagtcggatgttcgtccgacggtgtgcgccccgcgcgtcgcatggtgcgatggcggcggggttgctggtgtggaagacgtcgttggctttgccctgccggtcgtgcggtgggtgccggggtggtatggatgcgcttttgggctcccggatcgccaccccaggctttttgcctggcgcgattcgatgcccgtcgtgcctgggggccggccgtgtgccggtgcgatggcgtggcggtgcgtggtggcttgagaactggatagtggacgcgagcaaaacaagagtttttgaatctttgttttgctgttgatttcgaatcgaactctattgttcgtttcgatcgttttgtgatcatttttagtgtgatgatttgtcgtctgggaatttgctagaggaatcttgcggccatgcactttcgtggtgtgtgttgcttgcaagggcgtatggtggatgccttggcagacaggaccgatgaaggacgtttgaggctgcgatatgcctcggggagccgccaacagggctttgatccgaggatttccgaatgggggaacccaccgaccgtcatgggtcggtaccggcttcggccggggggtacgcagggaagtgaaacatctcagtacctgcaggaaaggatattccgtgagtagtggcgagcgaaagcggatgatggccaaaccttgcgcgtgtgatacccgtcgggggttgcgcgcggggtgttgcgggatcgcgtgcgccggctccgacgggccggccggcagttgcagaaaaccatgtgtcaggggaaccgggttgaataccgggccgcagagggtgagggccccgtacctgaacgcgcatggtctgccgatcgcgtctcccaagtagcacgggtcccgtggaaccccgtgcgaatccgcccagaccgttgggtaagcctgaatattcctgtctgaccgatagcgaacgagtaccgtgagggaaaggtgaaaagtaccccgggaggggagtgaaacagtctctgaaaccgtgcgcctacaatccgtcggagcccttttgtggggtgacggcgtgcctatcgaaaaatgagtctgcgagtcagtggcatgtggcgagcataacccgtgtggggtatgcgtagcgaaggcgagtcttaaaaggcgtttgagtcgcgtgtcctggacccgaagcgggatgatctagccctgagcaggttgaagcgcgggtaagaccgcgtggaggaccgaacccacctgggttgaaaaccggggggatgacttggggctaggggtgaaaggccaatcaaattccgtgatagctggttctctccgaaatgcatttgggtgcagcgtcgggtcattacgtcccgggggtagagctactggatgcttgcgggcccgtatcgggtaccaacagcaaccaaactccgaataccggtgacgcgtatcccggcagtgagtcggcgggggataagcttcgtcgtcgaaagggaaacagcccagaccgtcgtctaaggtcccgaagcgtgtgctaagtgggaaaggatgtggagtcgcatagacagccaggaggttggctcagaagcagccacccttgaaagagtgcgtaacagctcactggtctagtggttccgcgccgacaatgtagcggggctcaagcacaccaccgaagacgcggcagtattttgtactgggtaggagagcgtcccatgaggggcgaagcggccgtgtgaacgcgccgtggacttcatgggagtgagaatgcagacatgagtagcgagagacgggtgaagatcccgtccgctggatgaccaagggttccagggccacgttcatcgtccctgggtgagtcgggtcctaaggcgaggccgacaggcgtagtcgaatggatgaacgggtcgatattcccgtaccggctttcagccgccaaaaccgaggcttggagtactaacctccgggtccgggcttactgctccttcgggggcgggatgccctggcctgttgggaccgatccttgtagtaggtcagcgcaggagtgacgcagaagggtagccggccgcggaggtggtcttccgtggtcaagcacgcagggcgtgggacaggcaaatccgtcccgcatgggtccgaggtgcgatgatgggggccttatggcccgatatccggtgatcccggctgccgagaaaagcttcggcgtcaggctcaaagccgcccgtaccccaaaccgacactggtggtcaggtagagaataccaaagcgatcgagcgaatcctggtcaaggaactcggcaaatcactcccgttccttcggtttaagggagacccccgatggtgaacacgcttgctgtgggagcttttgggggtggcacagaccagggggtagcgactgtttaccaaaaacacaggtgcatgcgaaggcgcaagccgctgtatatgcactgacgcctgcccggtgccggaaggttaagaggatccgtcagccttcgggtgaagcggtgaattcaagccccggtaaacggcggtggtaactataaccatcctaaggtagcgaaattccttgtcgggtaagttccgacctgcacgaatggcgtaacgacttccccactgtctcgaccaggagctcggcgaaattgcagtacgagtaaagatgctcgttaagcgcagaaggacgaaaagaccccgggacctttactataccttggtattggcattcggtgtggattgtgtagcataggcgggaggccgagaggcgcggtcgccagatcgcgcggagccgtaaggtgaaataccgctctgttcgcattggatgtctaacctcgaacagtcatcctgttcagggacagtgcctggcgggtagtttaactggggcggttgcctcccaaagagtaacggaggcgcccaaaggtccgctcagcccggttggcaatcgggtggcgagtgcaagtgcacaagcgggcttgactgcgaggacgacggtccgagcagggacgaaagtcgggactagtgatccggtgccggtgtacggacgcggcatcgctcaacggataaaaggtaccccggggataacaggctgatcattcccaagagtccatatcgacgggatggtttggcacctcgatgtcggctcgtcgcatcctggggctggagcaggtcccaagggttcggctgttcgccgattaaagcggcacgcgagctgggttcagaacgtcgtgagacagtttggtctctatcctctgcgctcgttggaatgctgaggaggcctgcccatagtacgagaggacctgggtggacgaacctctggtatgccggttgtcacgccagtggcacggccggttggctacgttcggaagggataaccgctgaaagcatctaagcgggaagcctgctccaagataagcattccgtggaaccttcgagttcctgtagtccccatgcagaacacgtggtcgataggccggacgtggaagccccgcgaggggtggagccgaccggtactaacggacgaaaggcaacaccaacattccaacccctggcggttggaccgcatcttcctcctgcaaacgacaccagacggcaatgagcattgtctggccacaagacgaaacatcgacatatccgcgtccgctgtccggttcccaggccgccacaggccggcgggacattgttcccgaccgtataagagaagatttgcggcggccatggcccaggtgagacgcccggtcccattccgaacccggaagctaaggcctggcacggcgatggtactgcacccgacagggtgtgggagagtagcacgccgccgcatcacacttacaggaagccccttggagcacacgccccaaggggctttcgcatacccgaaacactcacgacccaaacccacacacccccacaaaaacacccggggcttctcgcactcatgagacccacgtccgggaccattcccggccagccccgccgtcggggccgaagagagacggcgcggcgcgttcccatttccgcaggaaatccggaaaacagcacgtccgtgaccgtggaatcccgacgcccgggcctcctccccccccccggtctgctgtgcggacggggcgggttctagtgatcgttgcaacacctgacctaccgcaaggagggtcaggtgaccagaagccaccgaaacgaagaccgtggcggggaacaccgttggacgttcaacggcgtcgaatatccgacgaggaagctgatgtgcgaggcgagacgcgccgagtacgtgcgcctgctggacgaggaaggcatgaacttcacccaggccgcgcacgcggtcggcgtctcgaaacgcaccggcaaggcgtggcgcaacggcaggacgcgcgccacgggaaggaacgagaaacccctggtggactggtatcgttccaccatggacaaacccaagaccctccatccgcgatacctgagccaggaggagcgcatccagatcgcggaccgtctgcgtctgggcgattcgatccgcgccatcgcccgcctgctgggccgcgaccccggcacggtcagccgcgaggtcgagcgcaacaggaatcccgagtccggcggttacgagccttaccgcgcccagcagaaggccgcggaccggctcaaacgccccaaaccgcgcaaggcggccgagggcacgcgactgtgggacgagatcgccgccgggttgcgcaggcattggagcccggagcagatagccaaccggctgaggctggacttcccggataatggggatatgcacgcgagcgtcgagacgatctaccaggccatctacctgcaggccaggggcgaactcaagcaggagctgaaacgcgccatgaggcaggggcgaaccgcccgcagaccccaaggcggccaaggccgcaaaccccgtttccgcgaacccatggccatgatctcggagcgacccccggagatcgaggaccgggcggtcccgggccactgggagggcgatctcatcaccggcagccgcaacaaaagcgccatcggcacgctcgtcgagcgcaccaccaggttcacgatcctgctgcacctgcccgacgggcacgacgccgaacacgtccagcaggccatcatcgacaagatgcagcacctgcccaaactcctgcgcaacagcctgacctgggaccagggagcggaactcgccctgcacaaacggatcggcgcctcgctggacatggccgtctacttctgcgacccgcactccccgtggcagcgcggcaccaacgagaacaccaacgggctcctgcgccagtacttccccaaaggcaccgacctatccgtctacccggaggactacctcgacgcggtcgccgaggaactcaacgaccggccacgcaaaaccctcgggttcatgaaaccaagcgagaagatcatcgaactgctcgacgccgcgtgataacctcaacaaccgacaacatgaccatggaaggccgctcaaacctcaggtgttgcaaccaccactagaatctgcccggcccccctgaggggagccagaaactggcttggttatggggtcgctctacactggcttctgctatgcattacttcacccctaaacgttgcgctacgtcgaataaaatcatgtatcacgataaggcgcaggttcagcgtgccgctgatcaaagcctaatcgagcgcggagttgagctatgggtgtaccgttgcgaattttgcggatgctggcatctcacgcatcgcgatccgcaatccagttaccggcatgtaccgctgaaccagcaactcaagccacacagtcgtaaaaagggctacaagccacgtagacgttagcgtcagaagctccacaggcctcgccaacgccgtgtctgagacaggttacggtccaaacacgtcaggtcgtaggctgctaagcgttcagggcgctcggacacacttcgtccaacacttacatcaccttggtgttttcaaggttgcggataacccaatcgttgaagcgaattaccggcttgcgcaacataagtcccaacagcaatgaggggacaaggaacagtgccagtttgcccatggaaacccagtattccatgccgaatgagcctgccatggccgaatgcatcgcatccaccgcataggggaacagtagccatttagaaacgacctggaagaacgtcggcagtgtttcaatggggaatgtgccgccggaaccggctacctgcataaccagcagtactacggcaatggctttgccgatatcaccgaacgacagggtcagcgtatacacaatattcgagaacaccagtgcagacaaccacccgaccatcaagaactgaatcggatgctcacactgcacgccgagatagaacatatcgcccaggcacaccagcgtaccttgcagcaaagcaaggaaaccgaaaatcatgtatcggccgaaatattcgtggtgcaagcgtaaaccgaactgccgcgcattgccgggagcctcggcacgcggcttcttcagcacatccaacgcggcggccggtccggcaatccgcccggcaatcatggcctcgcgaagacccacttccgaaccgagcggcagatcattgcccaaccctaagatacgagccttctcatggtcggaaatcgatactttcaacatggcgaccagaatgatcgcaccgacccaaatagacaaaatcgtgtagaacggagccatcgcggaaccatagttggcaacgggatagagcgcgatgcggtcgaccgctacgggtgccgccagcatggaagcaatgacatcgggtttcgcagaggaaatcacagacaggtcgatggtgccgccattggtgatagaggcgagttgggaagacaagttgtcgagtttcttcgccgaacgggtcaaagcgctagctgcgtcagtcaaggccgactggatgtccgtcaggctgtctgaaacgccgccagaaaggcctgacacgctgctgacggtcgatgcaagcccgtcgattacggaacttgcctgcgtggccacttcgtccatggacgaggtcagattgttcagttgcggtttcagcgtgctcttgtacgtgtctgaagcctgagtaatcgattgtttggcggcagcgatttgtgatttcagatctcgacgcgctgtatcggcatcggcagtaccgtttgctatgtgcgtggccgcatcgcccaacgcggtggcggcttgctgcatgctctgctgcgcctttgtggcttggtctgcagccgcgttcagttgagcggcaacggtatctccgcccacgggcagtgaagccgcttgtttggcgagatctcgtaaagcggcggcatactttccaaagctgtcagcctgagcctccactttgaattgcatatcggttagcttgtttgatatctgtgaggattgtgagcccacatcggcaaaagcggcatcgatttgcttggcaatggtgtcgtaggatgaaccggcctgctgcaatgccgtaccgacgccatcggtggctccggacaatgccttgtcgaggctggagacgccgttgcgggtctgtttcaacgcctttttggttgtggccgcagctgagcctgttgaccccagcagcttatcggtggaatcaatgatgctgttggcggccccgagcagattggcataggaatccatctgcgacgcagtgccggtcaaacgagacgacatggtggcaatatgactggtggcgttgttgacgtactgctccatttgcgggctttgcgcgtaatcggccacgttggaaaccaaatccagcgccacgctcgccaaggtcttcacgaatgtctggtcgatggtcgtggccacggtggtagcaccctggtcggtgatatgcggagcgatcggattgattttctcattgagatagtattcgagcttggcgtgcttgatcttcggtgaaaacagcgtcatcatatcggagctgaagctctttggaataatcagcgcggcatagtattcgcctgagttcacgccatcgatggccttagcacgatccacaaactgccagtcaaggtcatgattggccctgagcgtattggtcacggtttcgccgacgttgatggtgatcggcatcagatcggacttatagccctcatccacgttcgccacagcgaccttcaaggccttggtattgccgtacgggtcccagctggcggcgatgttgtaccaggcgtacagtgccggcacaatcgccaatcccatagccacgattacggcgatcacattgcgggtggcttggcgcacgtcacgtacgaatattttccagataagcttcatcgtgcgcctccctgcccagactgaccggactgaccggactgtgcggtgtgcgcagtcggctcggtgacctgatcactgaacggtgcgagtcgttcagtggtttcgccgatatccggattgctgcccatcgccgcttcgtgacgtccgtggccgtggaaacgccgccacacatatccgttgagcatcacattgcggaactcgtcggcactcatggcgctgacgccaagctgcatggcgtaggcttcgcgtgcgtattcaaccacaatgagataggcgtcgataagaataatcgacagaatccaagaggtcagcatggcgattttctcttgggtgacgaacagcagcaccaggaatacgaacgggagtacggtcagcaatgccagaccggcaacgatcatctttggataccgtgcgaagaaccggtgcgcgcgatgggcgatgatatcgcgcagttccttgctgtcggacaccgtgcggaatacggagttcaagctcacctgttcgttcaccatgctgttgtgctcggtgatcatcaggtcggtatctcccaaacgacggtcgaacagcgcgttcaggttcatcgcataccggcgtatgacaagtcccacgaagagtgccgccggcagataccagaacaggtgcagcatgtcgagccagtaatggttcgcgtacaggccggcaatcgggccgcgcatcgcgttgatgccgtaggtaaagggcagccacgggtgcagttcgcggaagaagttcggcatcatttcaatcggatacaggccggaggcgccgggtatctgcacaatgaccagaattacggcgatggctttgccgatatggcggaacgccacggccagtgcgtaaataatgttgatgtatacgaacgaacagaagattccggccaagatgaacagcagcggatgctcgcattggatgccaagcaccagatcgccgatggtggcgatgacggcttgcaggaatccgatggtgaccagcagcagccagcggccaagatatgcttgcgtagcggtgatacggcgaatgccctcgcggtcgacctcaagcttgtagatggcgattagcacgaaaccgcctacccacagtgccagattcgtgtagaacggggtgactgcggacccgtaattgtcggtggcatacacgactttcgtggtcagggtgacgggattgcccatgaagtcgccgaatcccttgtcatccagatgcagcgtatcccggattttctggtaagcggcggaactatcgagcgtggcgatatcggtgcgtacggtggcgacatcgctggccacctggcgcagcgaatcctgcgtgctgctgatggtggtttttgtttggttcagggtatcgacaagctggtcgaacagtccgtcggcctgatccaaggtgccggataacgaagtcaacgtgccatccagtgtgccattcagggcggcgaaactgttcaatgatgaggtgagcgacggcattacggtgccggtcagcgagccgcgcgcggtattcagcgccgcgatgccgccggtggtggtgttggtcatggctccggaaagattcgtggtggcgtctttaccggagttgatgaactgtgtggtgtcggtatggaaggtgttgagctgtgtctgctgtttgctgatcaatgagtcgagcgcatcgatttgtttccagatgttctggccgaccgggtcggtggtgtctttgccgatgccggctttggtcagcgcgtctttcagatcgctgattgacgtttgggtggcattcagtggggccgaaagtgtgttggtgatggtgtcgacggagttctgcgcgctgttgaaggagccggtgatgctgccggcggcgttgttgacgtgaacggccagtccggagagttgtgctgaactggtgtcgagcgcgccgaccagtgtggtggagaaggcttgtgacccggcctgtgtttccgccaacagtgtgccggactggcgggaggccttctgcgcggccgcgacggtctgcctgagtgaggcggtggtctgtttggcgtcggcgagaatcgtgtctgattgggccagcgtgtcctgtaagtcggtgagtgaatcctgaacggtgttcagcgtggacatcaccgtattgagatcattgatcgtatcgtgctggactttgccggtggcttggtcgagatcgcctcccgcttcggaaacggccgaggcaacggtggtggctaccgtggtgacgaaggcggagttgatctgctcgtcgatggtggtggcaccggtgtcggtgattttcggcgcgatcgcgttcttcttctcgttgacgtaatacttgattttcggctgtttggaggttccggtcaccgattcgaccaggctggtgctgaaatccttgggcagcacgatggctgcatagtattcgccggtctccacgccgtgtacggcctgttcctcattgtctacgaagcgccagccgagttcgtcgttctgcttgagtttcttgacgacctgccggcccgcatcgagatggccgaccagatcgttggtggtgccttggtcttcattggctacggccacttgcagattgccggtggctgaatagggatcccagttggcgagaatgttgaaccatgcgtacagcgagggcagtattgctacgccgagcgtcaccacaacggcaacgggattgcgtaagatacgtctgcaatcgcgcagaaagacttgccaaaccttccgcatccagtccctcttttccggttcgtagtcattgcggccacatgcagtctattcctaccactggtgcggatactgctggttttgcgggttctcttgcaaaactggccgttggttgtccgcatagtgggactgatatgtggacgtttattgatggtgcgacaccggcgggatggttgtgcaattttgccggtatccggtgatgaaatgttgaggtgttgggactgagtcgtcgcagtgctgagactgagacgactcagtgacgagcccatccgagcctatttcgttggttctggtcttactgatccagacggaagccctgagcggcggccttgtcgagcagtgtctgatggctgacatcctgctggctgatcgtggcgacctgatcgctgaaggcgtccaccggacggtcggcttggcgcagatcgtagtaccggtgaacttcctcgtcgaaggcgggcagctggtcgagtacgccatcggcgtcagccgggtaggtgttctcgaagaactgcatcgtgcgcggcatgcgcggcttgacggtcgggttctgatcgggcttgccgatggccagacccagcaccggatacgtgtattccggcagattcagcacgtcgataaggccggggatgttgttgagcagagagccgagaatcacgcagcccagtcccagcgaataggcggcggtctccatggcgtgcaaggccagcactgcgtcgttctgagcttgggtgaagcgatagctgtacttgagatggaattcgtcggaagcgggatcgatgcccttgcgttcggcgatgcgcgcgttgcggtgctcgtcgataacgaacacgtacagcagcggcgcagtggcaatatacggctgatggccgaattcggcgagcttggctttgatggccggatcggtgaggcggatggcggaccagtcgttaaggaactggctggacgcggcatgctgggcgacggtttcgagcgtggcgcgggtatcgtcgtcgatgcctcgtccttgaacttacggatggagcggcggcccagaagagcctcgattgttgcgttggtaaccatggttttattgtcgcacggcagacgccggacgccacggtggattacctcacagtgaaatgccgatattgtgtggcggaactgtgctggactgatggttcctgtcgattggctgatggttccttgacgaaattccagcgatgagccatcagtcaaccaacagaaaccatcatccaaccgggggattagcggctggacttgcgatggcggtggccgacgaacgccttggagccccgatccgacagctgcgaaaccactgcgccgagtgcggccgaaacggcggcgaatgccagactcattgccagaccttgcggcgcgtctgccgccagtcccttgcgcagattgcgtttgctcgtgcccttgtcccatatcatctggaatgctttgccggcaaccaagcctgccagcgctgggactgccgacttgatgagcttgtcgcccagagaatcagggtcgttgagccggtcctcgcgcagcctgttgaccttctcgtcgatgcggtgcaggctgtcgaccgcacggtcggcgctggaggggaagtcggtgttcgtttcgtcgctcatgactctcagtctaatagcatctcaatcatctcagcgcaaaagatgggcgttaatggtggagtcatgaacgagcgcagactagagtggaggcatgagcgaacagaacgtgaacggcaccgttgccgtcgagaactctcgtggcggcaacggatttttggtgttgctgcgccacggccagaccgtgtggagcgaatccgggcagcataccgggcgcacgaacatcccgttgaccgcggtcggcgagcagcaggcagcggatgccggaaggcgcctgcgcgaagctttccccgaaggattcagtcagggctgtgtgttttccagtccgctgaagcgggcgtgccaaaccgctgaactggccggttttgcggaccacggtgtgttggacggcatcgctgaatgggattatggccgagccgaggggcgtacgcgccagcaggtgagtgaggccagcggttttgaatgggatgtgtggcgtgacgggccgcgctcgctgacgcccacgctggagggcgattgggtcgagaccttaccttcgggcgagcaggtgccggtccatgccgggcctggcgagacgctggaagaagcagcggtacgcgccaagagcgccatcgatgagattacgccgctgctgaaagacggccataatgtgctgttggtggctcatgcgcacatcctgcgcatcctcacctcgcaatggctgggcgtggacccgcatttcgcgcggttgctgcgtttggatacggcgcactactcggtgctcagcgtctataagggagataacgtcatcgaacggtggaacgcctagccccggttgcgctgtgattacgctggcctgcccgctgctgcgggcgggcctttattgtttgtggtgggaattgcggtatgtcgataaatgatttgcaaacgatagcgtcgccgtgttgttttttttttgatgggcataagtgacaatcgattgccatgaaagatatgttagcgctctcataattgcgaacgcttgcattgcgataatgaggaaaaaaatgaccgaatcaatgggatatttgttgacaatggcctgaaaatgatgatttatgacgcgccgatattgctatcgtttgcaaaaagaagcaaaccgttgcacaatagtgcatgtcgatagtcataaaggtgcgtgttagcgtacctgtcctgaccggggatggccgggtcgacgatgaaagagaaaggttcgatgatgaatcgtacagtgaagtcagcggtcgcagtggcggccatcgctgcaatgtccctcggcactttggcggcctgcggaagctcgacctccggcgatgacgccaagggcaaggtctactacctgaacttcaagccggaagcggctgatcagtgggccgctctggccaaggagtacaccaaggagaagggcgttgatgtcaaggtccagaccgcggcctccggcacctacgagcagaccctgaagtccgagattgccaagaccgaggccccgaccctgttccaggtgaacggcccggtcggctaccagaactggaagaagtacaccgccgacatgtccaacacggatgtgtataaggaactcaccaaccaggacgtggccctgaaagacggcgacaaggtggtcggtgtgccgtacgtgatggaaacctacggcctgatctacaacaaggacatccttaacaaatacttcgcgctggatggtgccaaagccacgtccatggacgaaatcgacaacttcgacaccctgaaggccgtggccgacgacatgcaggcccgcaaggacgagctcggcatcaagggcgcgttcacctccgccggcttcgactccagctccgactggcgattcaagacccatctggccaacctgccgctctactatgagttcaaggacgacaacgtcaccgagcagccggccaccatcaagggcacttatctgccgaactacaagaagatcttcgacctgtacatcaccgactccaccaccgaccccacccagctgagcgccaagaccggcgatgatgcgaactccgagttcgcgctcggcgaggccgccttctaccagaacggcacctgggcttggaccgacctgcagaaggccggcatgaaggccgaatccgtgggcatgatgccaatctacaccggtgtcaagggtgaagagaagcagggcttggccactggttccgagaactactggtgcatcaacgacaaggcctccgacgccgacaagaaggccaccgaggacttcctctcctgggtgatcacctccgacaccggcaagaaggccatctctcaggacatgggcttcaccaccccgttcaagaccttcgatgacgtcaagtttgacaacccgctgaccgaagccgccgtggaagaccagaagtccggcacgacccaggtttcttggaacttcaccatgatgccgtccgaagagtggaagaacaaggtcggccaggcactgctcgagtacgcgcagggcaccggcaagtgggatgccgtcaagaccgccttcgtggacggttgggcttccgaatacgaggcctcgcactgagtctcatagagtcccatagccgataagcaacaatccgcggcgcccctgcctttccttctccaggggcgccgctttgtattgctgagtctcgcacaaaatcgtccgccgcagaaaagtgtgaggcacgcacccgctcaatcgcacgctgtggggccatgaatcggcgatttttcgccattctccacaatgtgcgattgagcgttactgtgcggttgcctcacactttttccatggtgggctttgttgtgtgagcctacttaacgcgggaggtggaggagcggaccttcagctgggccgggaacacgatgtagggttgctcaatcggcttttcgtcaatgagatcgagcgtcatgcgggctgccacgcgggccattcccaccggatcctggcggatggtggtcaggccgatatcgccggtgtagaaactatcgtcgtagccgatcaacgagacgtcgccgggcacggagaatccattgcgctccagctggaacataagcggcaaagcaatgccatcctcttggcatgcgatggcggtgggcatctcgtcttggcttatgagttggttgaccacgtcgctgatttcataacgtccatcgtcatcgaccttgcagacgataacctgcggctcgatgccttccctgcggcagcaggcggtgaatgagtcgaatcggctttgcacggagaagctcagcgacacctcgcgattggtgctgatgtaggtgatgcggcgatgtccgagattgataagatggcgggcggccagcgtggagccctgcacgtcgtcgatattgacggcggcggtaaagccgcgggcttcgggttcgactgaattgatgccgacgatcggcacgccgaccgaagccagttgcgcgatttcgttgttgtcgatatcgaaagacgccacaatcacggcatcggcgttacggcgtaccggcaacatctcgaagaattccttgcgctcctcgatgctggaaatctggaataccgaaatatcgtagccctgcgtgtgcagcacctcgttgagcccctcgatgaccgaggcggtgaaccacaggcggatatggccgctcatcagtactgcgatgcgcagggagcggccggatttcagggccgcagccgagcgggagagtgagaaattgagtttgtcggcgatggcgagcacgcgctcgcgggtcttggccgacaccagatccggcctggtgaaggaacgtgagacggtggagatggagacgccggcctcgcgggcgacatcctgaatgctcgtagccattgcagcccccttgcgttgaatggaaaatcgcaatacacatgcacaactgactccagtgtacatgctgattgattgatctgcggcgatgacaacgattgtattacaaacgtttgcaaagtgtctatgtcggcgttagattggctttatatagccattatcttaggtgaaagaagattgctggagccggagtgtgctcgaacttgaaacgcctaaaatgacaacgtttgacatataatgattcgacgtttactatgaacataggcttgaacgagaacaggccgtgcatgcggttctcgatcggcaagctcgcattgagttgaactccgcagccggcgcacgatgcagtgtcacaacgcagcggactcaaggaggaggaaaagtcatgatcagcatggctggcaaggcgatacgcagatggtgggcgctgttcgcgctccccacattcgccgcattcatcatcgggttcctggtgcccttcatcatgggcgtctacttaagcttctgcgaattcaccaccgttaccgacggtgaatgggtggggcttaagaactatggcaaagcgttgaaagacaaggaattcctgcacgcgctcggcttctccaccgcgttcaccatcgtgaccaccatcgtgatcaacgtgatcgccttcgccatcgcctacatgctgaccaaggcgatcaagggctccacgctgttccgctcggtattcttcatgccgaaccttatcggcggcatcatcctgggctacatctggctgctgctcctgaacggcgtactagcccactggggccgcgccctgacctataaggcgtcctacgggttctggggcttggtcatcctggtgtgctggcagcagatcggctacatgatgatcatctacatcgccggcctgcaagccctgcccaccgatgtgctggaggccgcggccgtggacggcgccaacggacggcagaccatgttccgcatcatcatcccgctgatgatgccgtccatcaccgtgtgctccttcctgaccgtgaccaacggtttcaagctctacgatcagaacctcgcattgaccaacggtgcgccgagcaacatgtctgaaggtctggcgctgaacatcacccgcaccttctacggccgtatgggctgggaaggcgtcggccaggcgaaggccgtgctgttcttcatcctggtcgcggtcatcgccctgattcagaacaagctcaccacgagcaaggaggtggcagcctgatgaacgagaacaagcctgtgaagcatggcgcattatggaccgtgctgtttgccgttgtctccctgttctggattttcccgatcgtcctggtgctgatcaactccttcaagcagaaggcgtacatctccaagaacgcgttctccctgcctgccggcaaggcgttcgtgggacttgagaactatgtgcgcggcatcgagaccacgcagttcttcgcctccttcggctggacgttgcttatcaccgtcggctcggtggtgctgattctggtgtgcacctcgatgtgcgcatggtggatcgtgcgcgtgaacaactgggccgcgaagctgctctacaccctgttcctgttcaatatgatcgtgccgttccagatggtgatgttcaccctctccaagatcgccgacatgctgaagctcaataccccgtggggcctgtgcatcgtgtacctcggtttcggtgccggtctggccgtgttcatcttcactggcgtgatcaagggcatcccgcaggagcttgaggagtccgccatgatcgacggcgcgtcagtgccgcgcatcttcttccagatcgtggtgccgattatgaagccgtcgatcgtctcggtggccatcctcgaagccatgtggatctggaacgactacctgctgccgtacctgacgctcgacctcggcaagtacaagaccgtctcggtcgccgtgcaatacctcaagggcggctacggttccgtggatatgggcgccatgatggcctgcctggtgctggccatcatccccatcatcgtcttctacttggtatgccagaagtatatagtctctggtgtcatggcgggcgcggtcaagggttgagcccgacaatttggctcccctccctgaggggagccaaaagctgtacaaggagtagttgatgaactggctggcaccggactcgaaattcatgcgcgcgtggagcaatcttgttgacggcgtatggatcaacattctgatgctggtcacttcgattccgatcatcaccatcggtgcggccctgaccgccggccatgatgcttgccgccgctccatcgagggcgagggcaaaggcgtaaccgccaactacttcaagtcattcaaagccaacttcatcaaagccacactgctgtggctgccgttcttggtggtgctgattgcactggtctggtcatggatcgtcctgcagatcacgccgctgctcatcatcaaattcgcgctgaccatcctctggcttatcggcttcgaatgggtgttcgcgcttcaggcacgcttcgagaacaccgtggccggcaccttgaagaacgccttcatcttcggcatctcccacatcgcgatgaccgtggccctggtcatcgcggatgccgtgttcgtggcgctgctggtggccagctggttctacatgcccggtggactgttcctgctggtgattcttggttacggcaccatgctgatgctccatatccccgtcaccgagcgtgttttcaatccatatctcattgactaggcgggttctctcgcgaatatgcggcgatcttcgaggtctgagcgttctctgtccacgcaagcgcggtaaagataacaaattgaggctattcgctgtttgtggtgggtgatggtcaagtggtggtgacggctttgaggtcgagtctgccgcaggtcaggtagatcatggtggcgaagtagtccatgttgcggaagcctctcgcccgtcgtttgacgttctggatgacgctgtcggcgccctcgagcacggcgttggtgtacgggtgctcgaagtaggcgacgatctcggcgaagtggcgtcggatcatgcgggcgaagtccttcatgggctcgagcctcgagtgcatcatccacgagcacaggcgatgcagacgcacccatgcctcggacggggtgcggctgtccgtgtagatgtcctgcaggacctcgcgcatccggcaggcgcggccggtcttcaaccgttgcctcgtcaggttgcgcttggtctccacctgcagttcggtcaggctttcctcgttgcgcagccacaggtacttggtccgtttgagcagcgggttggagcggccttccgtcttcccggccttgtcgacggcctcgttggcgtgcctggccacgtggaacctgtcgacgatccgccgcgcatggggcagatgctcacggatgcccttccggaagcccaggctcatgtcgcaggcgaccagacgcacatattccgggaccccgttgtggtccatgcaatcacgcgagaaccgttcgaccgtggccgggtccttgcccggcgtcacgttgatgacatcgtgctccacgagatcggcgaccacggtgatgtaattgtggcccctgcggctggtctcgtcgatgccgattggcccgtacccgcacctcgtcacagcttgtataatcacgattatactaatcgtgatacaataaatcgtgatgcgatagaaatacgccggcgtatggcataaaggaggcgggcagcatggcattcatcggacgagacgatgacctcaagcaactgcaggaatgtttcactgagcgtagggcacagcttgtgttcgtctacggccgcaggcgcgtgggaaaaacagagacgcttattcaactcgcaaaagacaaggaaaccttattcttcgcggcgcagaatgccactaaagatgaacagctggcatcgttctcccgtctcatgttcgaggcgggtgccccgggcaaggattatctgagtcaatatccttcttgggaaagggcgttaaccgagttaacccggctgccagagccgagcgatggcggccgcaggcttgtgatattcgatgagtttccttatctggtcaaatctgatccgtcattgccgtcagtgctacagaatctttgggaccacacgttgcgtcatgcaaatctgatgattgtgatttgcggcagtgccatgagcttcatcgaaaaggagctgttgggagaaaaatcgccgctatatggtcgtgcgaccggcatcctgaagatgctgccgatgccatattgggatgcagcgcaattcttccccaactatagtggcgaggataaggcgctggcctacgcaatactgggcggtatcccgcgttacctagaggaatttgacccagatgagaccatagacgcaaatgtcaagcggcatattctgagacgcattgctccgctatacagcgaggttgaatttttgttgcacgaagaactgcgggaaactgcgaaatataacagcgtgatacgggcgatcgcgctcggctcaacttcgctgaatgagatcgcgacacacacgatgatggcaaacgcaacagtatcgtcgtatctcgccaatcttatggaactggggattgtggaacgtgagttcccagtcacggcgaagcctaaggagcgggcgaaaggttcgcgtgggctgtatcagctgagcgacaatttcttccgattctggtattcgtttgtctttccgtatcgttcggaattggagcggggcgatgtggaaggcgtatacgagcgtcatatcaagccggtattacatgattttgccggcaaaccgttcgagggtctgtgccgtgaatggatgtggcgtgagagtgctgctggacggttgcccttccgtgcgcgtgcggttggccgttggtgggatcgtcaggatgagatagacgtgatggccgttgacaatgcgtctgatgctgccattgtgggcgagtgcaaattccgcaatgcgccggtggaccgttccgtgctgaatctactgcgagaccgtgctgcgcgaaccggtatcggccagcgaacatacctgctgttttcgctcggcggtttcgatcaatcactggtcgacgatgctgcggcgtctcaatccgacgttcagctcgtcggcatcgatgagctgtttcatgaataaatcccatttgcgaatagctctcactgagtgctcatcagtgagagctattcgcaaatggagccttacttcttcgcctgagtgatctggtaggcggcgaagagaatggcgagccagatcacgccggcgataacggcgacgcggtagctggcggagaagcacatgagcaccaccaccagtgccaagaacgccaacaccacccacggggtcaccttagcgaacggcagcttgaagtgaatcgcgtcgagcgcttccttgccggacttgccggccagttcggaatcctcgggagcgccgcccgcggcgaccaccttacggaacttcatttcggtgagcatgatcatcgtccagttgatgatgccggcaatggtggcaatcgacatcaggtagttgaacgcgaactcaggccacacgaacaccacgaccacggcgatggcggtgatcgcggcggacgtcagcacgccggccactggcacgccgcgcgagttgagcttgcccaagtaagcgggcgcattgccctgcttggccagcgagtacaacatgcgggagttggcgtacaggccggagttgtagacgctcatcacagcggtcaggcacacgaagttcaaaataccggcagccgcgtgaatgcccacggaatcgaagatctgcacgaacgggctggacttgccatcgatggtgttccacggcactacggccatgatcacacccagagcgccgatgtagaacacgaggattcgccaaataatatcattggtggcgcgcggaatcgtggtcttcggatcctcggtttcgccggcggtgatgccgatgagctcggtgccgccgaagctgaacatcaccacaaccagtgccatcagcaggccggtccaggaaccgtcggaattctgccccatcaggccgttcgggaagaagccgttacccacggtgaaccagttcgcgaagcttgcgcgcacgccggatgcggtgggcagggcaaagatgatgacggccaggccgccgataatcatggcgatcacggccacaatcttgatgatggcgaaccagaactcgaactcaccgaatttagagacgcccagcaggttggcggcgcagatgatcaccaagaacacggccgccgacacccatgtcggaatcgccgggaaccagtagttcacaaacgaacccaccacggacagctccaccatcgagacgaggatgtagttgaaccagtagttccagccggagatgaagccggcgcgcttggaccagtagcgagtggcatagtagctgaacgcgcccgccttcggatcctcgacggacatctcgctcagcgcgcgcacgatcatgaagatcgcgaggccgccgatcaggtaggccagcagaatcgaggggccggccagcgcgatggattcgctggaaccatagaacaggccggttccgatagcgccgcccagtgcaatcagctggatgtgacggttcttcagtgacttgcgcagcgtggccggcaccggcacatcgtcggtttcgcgcgacttcttaggcgcatcagcagtactcattgtgcccttctctcacatttcttgggttttggcgcacgcggggcttgccgcgatgcgcaacgttcgttattctatgccgccgtatcgtctcagaaatggtcaatcgtctatttgtgcgctatcgcaagcgcgggcgtgggcgcggccggtgagcaggcgaagctatagcgagcgatgcttatgaaaccgcacgcttcactgagttcactgaattcaccgtgttcactgcgtggcaggcatacacatggtgaagatggtgtgggccaccgattcgggagaggccgcgagatcggtggcgagccaatattgcaaaagcccaatgctgccggacacggcgaatcgcatacgcatctgcgcctcggctgggtaacccgccgaagattgcaactgttcgcctacaccgcgctggctgtaaatcaatcccagcagctgctgctggaaaccgatatccgctttcgggctcatcaatacctgcagatgcttgcgattgtcggcaatgtactggcagatgcgctcaataacatgctcgatgccggcagaatctggctgggcgagtagctgttcgagtgcggtggtgacccaggccatggtttcgtcttcaatgtcgtgcagcagttcctcgatgctcgcataatgcgcgtaaaacgtggaacgattcacgtcggcccgctcgcacaacgctttaacggtgatggagccgagcggctgatcgcgcagcaactcgataagcgcgtcctgcatggcacgtctcgtgtagcgggtgcggcggctttccgtcaattctttggccatggccttctccccaaattccgacaacccacaatccaactgttggttgcagaaccgacacagtgttgttttacttgagtatagcaggaagttttggcggggcctatggggctagttggctgccacgagcgcgttggaggtgtgcgatggcgtatatcgaattcgaccatgtggtcaaggaatatccttctggtagcagtgtgattcgcgcgctcgacgaggccagctttaccgccgaacaaggcgaattaagcgtgattctgggacagtccggtgccggcaaaaccacggcattgaacattctgggcggcatggataccgccacaaccggccgcgtagtggtcggcgggcgcgatattacgggcctgcggaaaaaggaactggtgacctaccggcgcaacgacatcggcttcgttttccagttctacaatcttgtgccgaaccttaccgcgctggaaaacgtggagcttgcctcacagatttgccccgaccatttcgacccggtggaaaccttgtacaaggtcgggttgggggagcgcatggggaacttcccagcgcaactgtccggcggcgaacaacagcgtgtatccatcgcccgcgcgattgccaaaaagccgaagctgctgttgtgtgatgagccgaccggtgcgctcgattacgagaccggtaaggaagtactgcagctgctgcaggatatttgccaaacgcaaggcatgaccgtgatgatcatcacgcataattccgcgcttgcaccgatggctcataaagtgattcgcttccgctccggcaaggtggccagcgaggagatcaacgcaacgccgcagcccatcgccgatatcgaatggtaggtgattggcgatgctcactgcaagacactctgtgaaacgccccgtgaaacaagcgaggcgatttgtgaaacattctgtgaaacggcggaacctcgacgatagcggcggtcgaggagcgggcgtttctgcggtatttgccaaagatacgttgcgttgctggctgcgcagctggaagaggttcgtctcgatcgccgtcattacgctgcttggcgtggccgtgctgaccggcatctacgccggatgccgcgatgcttttctggcggccggtcgtttttacgatcagcagggactgcatgacctgcaggtgctatccacatacggcctgaccgatgatgatgcggcggcactgcgacgaatcgacggtgtgcaaaccgtgcagcccgaacgttctcagacggtgaccacgttggtggacggcaccaagaaaaccgtgaccatgcaggaaatcggtaccgaagggcttgatcagccgtacctgcaacaaggcaaactgccgaacaaggccggcgaagtggcggtgactcagcagttcctgaacgatagcggactcaagattggcggcaccattactgtgacgccacaagacacctcttcatccgtcatatcggtagcggccacggagactgacgattccaataatgattccaatgacgattccaataatgccgatacggtaggtgtcgccgccaatgcctcggcatccgatgcgaagtccgacgccaatacggacgccgacgccgagcaatccccgcagttccccacgaaactcaccatcaccggcgtcgtactcgacccgcgcgacctcaacaatccagacggctattcgggcatgacctccttccggtccacctcatccgaggactatacgttctttgcacccagcgacggcgtgaccggcaatatatacactgcgatatcggttgccgtcactggtgcgtccgattttgacacgttttccgatgcctacgatgaagccatcaaaaccgtggccgaccgtatcgaacatcagatacaggccacacgccagaaagcccgtcgtcaacagatcgtctccagcgcgcagcgcaaactggatgatgcccaagacgaggccaacgagcagctggacgaagcccagaagcagatcgacgacaactgggccgagctggaagccaacgaaacgacattgcaagatagccgtaccgaattggagaacaacaggacaaccattaccgatggcgaacggcagctcgccgatggacgtgcgcagattgcaacggcccgtcaacagatcgcgcaaggtcgccagcagatagccgaagcgcgcacccagctcgaatcaggcaaaacgcagctcacctcggctcgcaaacagctcgatgcggcgcaaacggaactgaccgccaatcgcacgaaaatcgaacagggcattacccaaatcgaccaaggcatggcgcaaattgatcagatgctgcccatgattcaacaggccaacaatctactggcgcaacttgacccgaatatcgacctcaactcacccacatggcaggccatcaagcaactgctcgcgcgccttggcattaccgtgcctgaagtgccgtcaatcagcgatctgcggcaacagctgaccgccaagcaaacggaactgcaaacgcagcgagacagtctggcccagcagaaagccgatttgcagcgcacattaaacgaaaccattgcccccgcacaatccaccttggaccagcagaacgcgcaactgaccgccaaggaacaggaagcggctgcaggagaggcacagctcaataccaaatccgcggaactcgaagcgaatgccgcaaccctcgaaacccagtcggcgcaacttgaagcgcaggccgcccaactggccagcggcaagcggcagcttgaagaaggcgagcggcagctgaaagaaggcgaacaacagctcgcggacggcaaggcgaaactggatgatgcgcagtctgcactcgatgcgatgcgaagcgaagcggaaagcgaattcgccaagcagcaacggcgcatcgacgatgtggccaacgcacgttggtatgtgcagacgcgcgcttcgatcgacggattcagctcgctcaaatcagatgtcagttccatcgaatccatcggacgcgcattcccgattgtgttcctgctggtcgccgtgctcatgagcctgaccaccatgacccgcatggtcgaggaagatcgcggacttatcggcacctaccttggactcggctatggcggactcgccgtgtccagccggtatctgctgttcgcgttgctcgcctgcttggtcggcggcggcatcggtctgctggtcggattcctcggcatcccggcattcctgatggtggtgattgagggactgtatatattgcccggtgtgcgacttgaatacgactggctgtacggctcggccggcatcgtgctgttcgtggtcggtgtgggcgtggtcaccgcgctcgcctgccgcgaggagatacggcacacgcccgccgcgctgatgcgcccgaaggcgccgaaggcgggcgctcgcatattgttggagcggattcgcccggtatggagccggctgaacttcctcggcaaagtcactgcgcgcaatatcttccgattcaagtcgcgtttgattatgaccgtgggcggcgtggccggttgcacagcgctgattatctgcggatttgcgattaacgacaccgtcgacacgactggcgtcaaacaatatgagcagatctaccagtatgacttgatggtggtggccaatgacgatgacgccgccgcgatgcgcaagcaggtggcacaagatggccgggccaccgaaacgctgaatctgcgcgtggatagcggcgagatgagcaatgcggcgcaggaaagcgaaaccgtgcagctgatgacggtgcccaacaattcgttgaacaaactgaacgacatggtcacgctggaagaggccggtgacgatgggtggttcgagctgcccaatatcttcggcaaagcgggtggcggcactgtagcgctggacgatagtggtgtgattgtggcgaagtccgcagccaattcgttggatattcatgcgggcgacaccgtcacgttgagcaatggcggcagcgggcgggccaaggtgaaggttgcggcggtgacgcgcaacctcatcggctctgatgtgtacatcagtgagcgactgtacgaccagaagtttgcggccgacggtgtgacgtcttcggcttcgggagatggcactgcctcgaccttgacgtggaacgcgatgctcgccaagctgaaaggttccgagaccgaacaggccgaatatgcggatcggttgggcgaggaatcgtcggtgctcaaggccgtgagctgtgcgcatctggccgccacgtttaagttcgatttgatgggtgccgtggtggcgctgattgtggggctcgccggcggcctggcgctggtggtgctgtttacgttggccaatacgaacgtgtccgaacgcatccgcgagatggccacactgaaggtgctgggcttctatgaccgcgaggtgcacaactacgtgaaccgcgagatgatgatattgaccggtatgggtgtggtggttggtctgccgcttggcaggtggataggcggattactgactgctgcgttgaatatgccgtcgctgtatttcgaagtggaagtgcactggtacagctatgcgattgccgtggtggcgacgctggcgttcgcgctgctggtgcagctgttcaccaacccagtgctcgatcgcgtagacccggtcagctcgctcaagtccgtggaatagaggtagaagttcaatttggtgttgatgaattgaactttttggcggaatatttacagtatcatcgcatgtattcttgagctgagcggttttcgtgacatatttcggtgatacagtttgaacttgttttgaacgagtatcgcgtctggtgcgtaacaatcgggcggcagagaagagaaatgaaatcagtatggccgatacgaatgtgaatggtggtacacagcaggctacgggcaaactcaagtctgtcgaaagcctggaccagaccaacgagatggagcgtggcctgagcaatcgccacgtacagttcatcgccattggcggcaccatcggcaccggcctgttcctgggctcgggcaagtcaatctcgctaaccggcccctcgatcatcttcgtgtacattctggtcggtgtcatcatgttcttcctgatgcgcgccatcggcgaaatgatgtaccgtgaccccagccagcacaccttcatcaatttcatcacccgttaccttggcaacgggtgggggcatttcgccggctggacgtattgggccgcgctcgtgctgctgggcatgaccgagatcacggccgtctccacgtacttcatcaccttcttcgacacgttcggcatcgacctgacccattggaaatggctgatcgagctgtgtttcctggtgtcgctggtctccatcaacctgattgccgtcaaggtgttcggcgaggtggaattctggttctcgatgatcaagatcacgctgatttgcgcgatgatcgccaccgccgtggtcatgatcgtgatcggctaccattacccagccgtgcagattcacggcgtggaccacgtgagcccggccggccacgccggattcgacaacctgttcgccaacttctcgttcgcgccgaacggttggatggccttcctcatgagcttccagatggtgttcttcgcctacgagatgattgaattcgtgggcgtcaccgtctccgagaccaagaatccgcgcaaggtgctgcccaaggccatcaacgagattatcgtgcgcgtgctcatcttctatgtgggcgcgctcgtggccatcatgtgcatcgtgccgtggacctcgttcaagccgaacaaggacggctccttcgcatccccgttcattatggtgttccagtatgccgggctgaattgggcgtctgcgctggtgttcttcgtggtgatcaccgccgcatcttccgcgctgaactcgctgctgtactcggctggccgccacctgtaccagctgtccgaggtgtcgccgaacccgatgctgaacaagctcggcaaggtgtccgatcgcaaggtgccggcccgcgccatcctggtgtccgcggcgctgatactgctgtcgccgatcgtcaacgccatccccggtgtgtccggagcgttcgtgctgttctcgtccgccagctccgcggtgttcctgttcatctacatcctgacgctgatggcacaccgcaagtaccgtcgctccgctgatttcattccggacgggttcgtcatgcccgcttggaaggtgctcaatacggtggcaatcgtgttcttcgtgttcatctacctgacgttgttccttgcggacgatacgcgcaattccgcgattgccggcctggtgtggcttgtgggcttcggtggattctctatgctgcgcgaacgctaccgtagccgcgatttaaaggccgcactggaacacaaggagtgattggacgggctgattggctggcggctattagttggttggctgttggctgttggcggctgactggctagcggccgatagccaatgactgggctgatcgtcagccaatcggctgcctataggtctcattgatacattcggtcatccgattagtgcatttgcgcggacaattagtgcattcgatcatcggattagtacatcagtgtgcaattattagtacaattagccgcctaattagtacattaggacataaaacaatgtcctaatgtactaattagatgctaaaatacgataagtgccatgtcctaatgtatgaattatcgctatgaagggcggaatgcgatgacgcaggatgaacttatgcaagtgctgcaggccggtgaatcatctatggtcgagttcaagcgctgcagcgaattgcctcatacggatacttttgagactgtatgctcattcgccaatcgttctggtggcagcatttatcttggcgttgacgatgacggtcaagtgctcggcgtcgattctaagcgcgttagtgagatagagcgcaacgttgtcaacgtagtgtctaatcgtaagatgttcgaaccggctccaatggtggaaacggaacatatcgagtacgacgaacggattattgttcgtatttgggtagctccgagttcttcggttgtgcggttcaagggcgcagtgtttgatcgcattgctgatgtggatacacacatcgaaagcgatatccagattagtcaaatgtatattcgcaagcagaactactattccgaacggcgaattttccgttacgtgactccgtttgatttgcgtcctgagctgattgcgcgaatgcggcagctggcggtcgctcagcgagctgggcacccttggggaactatgtctgacgaagaactgttccgcagcgccaagctatacgatcgtgattacacgaccggcgaagagggctttaatcttgctgcagtgctgctcttgggcaaggatgaagtcatttcctcggtttgcccagcgtatattactgatgccgtggttcggcgagacaatattgaccgatacgatgaccgacttatggtgcggaccaacttgttcgattcgtacgagcaactccgtgaatttactgagcggaatctgcctgaccgctttgtgttaaagggcgataagcgagtgagcccgcgtacgatgatcgcccgtgaattggtggcaaacagcctcatgcatcgggagtattccagtccggtggtggcgcgtgtcaccattgataatgaatccatccggacggttaatgcttcgcgctcattctttgaaggtcgaatgaagctgggcgagttcacgccaatgccaaagaatccgattatcgctaatgtgtttgtgcagaccggcatagccgagcagctgggtagcggactgcggaatctgataagagcgtcccggcaatatactgagcgagagcctgagttccgcgatggtgacatattcgaggcgacgatccctattgttcctgcgctgaagaccgtggatggttctggttttgctagcgtgagatctgtagttgagaaagatgccgaagagggtgcgaggctcattggcggggaacgtgtggatggtaagaaagcagatgcaaccgcatcgggtgaaattgattcgcgggcagcgatgctgtcggcgatgaatcgacgcttgacagaggttgactatgtgactgtacctgaactcgccaagataacagagctcgataacagaacagtccgcaaattcctaaacggtttagttgcgcaaggaaagctgattgctgaaggcaacacgcgtggtcggcgttatcggaagggatagcgggcgcgatatctcgatgcagtgggattcacttaagggctacggcaaatatgattcgtagcgattgggccagcgcaattcgaatggctcatgactttgtgcgtcgtttgtggtctctgaagttgtttgctgggtgacggttttgtgataaaatcgctcatatcaaaatgtttgcgtaaacattttggctgcgccgaaagaaggagtcgacgtaggtcatgtatcaggcaaagaggccggctcagtgaagcaaaggccgatttttccggtataaggcggacagcaggaacactaaggagaccaatgaaggtactgagcaaatcgcttgctgcaatggttgcggcggcaacactagtgggaggaggggcgtttgcggttgccggcactgcgtatgcggctgataacgatgccattaccgtgaccccgaacccgtggtatgccaacagtttcgatggctggggcacctcactggcttggttcgccaacgccaccggcagcctcggcgaggaatcggccatcaccaccaatctcggcgatgacgcttccaaggctaaggctgtggaatacggcaaacagctgcgcgaacagttctaccagtccatcttcggtgatgaaggactggacctgaacatggcccgctacaacgtgggcggcggcaatgcctccgatgttgcctacggctacccattcatgcgccaaggcgctgccgtgcctggcacgtggaaagatgacgccaccggttccggcacgtatggcaatggcgtaaccaccaagcaggccgacaaagacaagctggctgcggcattcgacccgactgacgacaaccagtatgacttctccaagtccgccgcccaagactggtggattgagcgcggtgccaccggcgataaccctgacatcaccgacgtagaggccttcgccaactccgctccgtggttcctgaccaacagtggttacgccactggtggacgcaactccggtagcaataatcttgcaaaccctgagaaattcgctcagtacatggccaagaacgtcgagcacctcgaaagccttggcgcaaacgttgacacggtcgagccgttcaacgagtccgagaccagttactggggcactccgggcgacatggcttcgaagtacaccgatgagagcgatgacaacaccaagctcattaacaactactgggataagtactactccgacaaagataagtccgtcaccccatactccaacgcgctgaagaagccgcaggagggtatgcatgtcagcaacgcccagcagcagcagacgattaccgcactcgctgaggcgctcaaggacaatgatgacaccatcatcgcagccaccgatgccacgaactccgccgacttcgtcaagtcgtacaaccagtacccgcaggcgatcaaggaccttatcgatcagtacaatgttcacgcctactccgacggcagccagatgcaatcgcgcgatatcgctcaggcagacggcaagaagctgtcgatgagcgaggtggacggctcctggcagtctggctcctacaacccgtacggtttcgacaacgcgctgggcatgatgagcaagatcagctccaacgtcacccgcctgcagtccaaggacttcaccttctggcaggtggtcgaggacctctacaacatgcagatgggctcgaatgtgaatccggccggtgagaacaccaactggggcaccgtgctcatcgacttcgactgcaccgtggctggcatggacggcaagctctactccgagcgccgcgtgaacaacaacggcggtaccaccgatggacttgaaccgtgcacggttattgcaaacgccaagtacaacggcgtcaaggccatcacccacttcatccacgcgggcgacaaggtcatcgccaacaacgatgaagacaacaacatgactgccacctccgacgatggcaagacacagaccgtcatccaccgcaactccggcacctctgaccagaccttcgtcatcgacctgtcgaagtacggcgagattgccgacaacgcttacggtgagctctacctgaccaccgaaacctctgccgaagacaagaacgcgggtgtcgattccgccactccggaagtcttcgccaagaccagcaacgtcaagcaagctgaaggctctgtgatgattgacaaggctgccaagaccgctacggtcactgtgcccgcccgttctatcgcctccatccagctcactggcgtgaccggctacgctaaggatgctgccgtcgagaccggcgacacttaccagctcgttggtaagcagtccggcaaggccgtggctgataccacttctggtgattccgcgctgtccctggccaacgtcgcttccgatgccgagaacgccaagaagcagacttggacctttacccagatcgagcagcccgccgactccgagcgccctgatctcaaggcttatgtgattactaacgccgaaggcaaggtgctggtgtccaaggatggcacgaacgcgctttccaacgaaacggttgaggccgctaagtccgacccggctgccaagtggattctcaacacttccgatggttcgacctaccagctgctcaatgccgcgactaagacgaacctcgatgtggataactctggtaccacagtcggcacgaaggttggcttgtggcagtcaccgagcggcacttcgccgtccgccaaccagacatggactctacgcaatgtaacgccgaccagccagaagaccgtgaacgtgcagaccgccgttaacgagaaggccgcgctgccgaccgaagtcacgctctactacacctggggcgaaggcaaggccacggttgccaactgggatacttccaaggtcgatgtggccaaggaaggcacctacgaagccaccgctaccgccaccgatgtgtacggcaacgagttcaatgtcgccgctacggtctacgttggcgcgctcaccgtttccgatccggtatcggctacagtgctggccggcaccagtgcgagcgaggcgaaggccgcgcttgaggctgcgccggtgtatctgcacgtcaaggcatcgcctgcattcgagggcgatgcggctaaggttacgtggaacttcgatgggcttgataccaagctcgccgatgccaaggctggcgacaacattgccgtgaccggtacttaccagctggacgacgcgaccacgattgcgctgaagggcacgatctatgtcaccgccgccacgcctgagaatgtggccgacactgcttccagcctgaccgtgaccaaccagcagacggaatacagcaagggcgatcagtggaagaagctcaccgatggtgacacgtccgctgaagcctgggtgacgtggaactctgctggtgactattccgccagcccgaccgccacgattgacttcggctctgagtgtgagcttagcagcgtgaccattacgtatggtgacaaggctccggcttccgccaaggccgagtacaccactgatggcgagacgtggatgcaattcggtagcgatgttaagcctgccgcaggccagacggtgacgttcaaggccgataagggcacagtgaatgccacgaaggtgcgcattgtgaacaccgtgaacaacgactatatgaacgccaccgaaattcaggcattcgtgacgccggttcagggtgctgcgaagaacatcgccgcggcctctggcacgaacttctcggtgaacttccaggagggtgcctccgcttccaaggccatcgatggtgacactacgtcaaagggttggtccacttgggcttccaccgcctcgacggtggacccggtcgccacgttcaccttcgacgaagctcagaccatcaccgaagtgaagaccttcttctactacgatggtcgtgcgtcttggccgaagagccagacgctggaataccaggatgaggctggcgaatggcatgaagtcggtaccaaggatggctggaagacacaggccggcgatgccggctctggctccgacggcatcaccgccgccgacaccccgaccgttgacttcgtgctcgacaccccggtaaaggccaaggccatccgcctgaccaacacgttgcaggacaccaaggtgtacatcaacgtggccgaaattcaggtgttcgcacaagacaacaaggtgattaccccgcagccggcatccgatgccacgctgggcgacctgcgtcttgacggcgagaccatcaagggcttcgctgctgataagaccgactacacagttgatcttccgttcggtgctgaggcaaacccggtgctgcaggccttcgccgccgacaatgccgccaccgtcaaggtgactggcgacgcggttgagaatggcaagcttggcggcaaggccaccattacggtgacctcagccgacgagtctgagacgaagacctacacggtgaccttcaaagccttcactttggcttcgctcaaggtgaccggacccacgaagatcgagtacgccatcggcgacaagctcgataccgccggtctgaaggttactgccgtctatcagagtggcgacaagaccaaggaagtgccggtcgctcttgacgacccgcagcttgcgattggctcgttcgactccaccaccgcaggcaagaaggcgattaccgtctcctaccgtggtgtgaccgcgaccttcaacgtcacggtcaaggccaacgcagtcgcccctggccctgaagaacagaagcccggcagcaccaacaagcccggtgccaccggcaacggcaacaagaacacggtggccaacaccggttccaatgttgccgccatcgctggcgctgtcgctctgctggccgctgccgcgggtgcattgttcatgctgcgcaagcgtgcatagcaccctcgcacagtaatgggggaaggaacaagccggcaatattgactattgccggccggttcctccgctctttgagcataattggtccgacaagttgaatactgagttttcagtatcggtatattgatttgtcggcccttttctgacttcgcggatagcgacataactgtttgttcaaaaaaccgttatcatcaatcaaggaaccaaatcaatgaagataaacaataagggcaagggcgctcttatcgcggcaattaccgccgcggcaacgctattgtcatgcgggctggccgctgcaagtgccagtgcggcaggtgtggattacctgcctaccatcggccaagtgccgacatacaccaagttccagcccacagccgatccgggcaagaacgctagcgattacttccagccatattggtatgccaagaacgccaatgataatggcggcacacacatccaagcgcacggtggccaagtggtcaaggtcggcgacgcctactactggtatggcgaagaccgttctaacggttacgacaacagccccggtgttcatgcttatatgtcgacagatctatacaactggaccgatcttggtgtggcgctgcgtgcggtgaccagcaaatctcagttgacggataagagcaatgccgattacgcctacttcgacaaggcctacaacctgaccaagtccgacggcagtgtggacgctgccaaggccgacgcaatcttcccgtacctcaacaccaaccccgatcaggatggtgatggcgcggttgattccgtacagggcattttcgagcgtccgaagatcatctacaacaagaagaacaagcaatacgtgctgtggtggcattccgatggaagcaccacgccgggcggttccaactatgcacgtgcacttgcgggcgtggctgtttccgacaatccggcgggcccgttcactatggtgggtgcctatcgtttgcctaaccagaacaattggaaagaagccgcaggtaaccccagctggggtgagaacggtgacagccgcgatatgactgtgttcgtggatccgaaggacgacagtgcctatgtactgtattcttccgaagccaatgccacgctgtacatcgccaagctcaacgatgattacaccaatgtagtcaagaccacgaatgtggaccagtccgagggacaaaagcagtactctgctgacgggcagtacccatacattcttgcagacgctactacggatgccccggtgcgtggcgaagatttccaaatcgtcaaacaaaatggttcgctggaagctcctgccgtattccaatatgacgggcgttacaacatcatcgcatctggtgcaaccggctgggacccgaacaagcagacctactacaccgccgactccatgctgggaagctggacccgtggcgtggaaaaggacgatgccaacgagaacacgtggtacaacaacatgccggaaggcgcggatggtctgttgtccgtgggcgatatccgcggcaccacattcggttcgcagtcggctagtgtgctcgcagtagaccaggagaaaggtcacttcatctaccttggtgaccgttgggattccggtaaagccgattccacctatgtttggctgccgctgaccatcggtgagaacggcaccatcgaaatgcacaatcctgctcaagaaggcgagcccgacggttgggatctgagctattgggacaaccatggtagcgccaagggcaagctggtcaactggactgtggaaaccggcgatgatctcccgaagaccgtgaacacgggcggaaccgttactctgccggacaccgtcaacgtcaaggaaggcgacgataccattgctaccaaggtgacatggaatgtggaaggcggtacggcagtcagcaagtcgaccaaggctgccggcagcacctacgcattcaatgtgccgggaacctacaccattacaggcactcttgccgagagcagcaacttcaacccgggccgcacattccgcagaaccatcgacgtttcctgctccaacccgatttccggaagttggaaggaagcccattggaagggcggcagcgcgtgccaggtcgccgcatccggcggtacctatgacttcaccgttacggacaacgccaatcgtggtgtctggacggatcgcaacgagggcagcgcggtgtaccagcctgatgctctggacgtgaacgaaacgttggaaaccacggtcaagccgctcgacttgggcggtaatggcgatccgcgtgccggcctggtggttcgtaacggtcttgctgacgctaacggcggcaagggatatgccacgttacttgccagcccaagcggcatttacatgcagtacgattccaatgccgatggctacatcgataaggaaacatcgcatgttggtgccggcttcggcgaccaagtgcaactcaagctggagcgcgccgcaaccgataccctgaaaggctactggcgtgcttccgcgaacgatgaatggcaggatgtcgctacggtaacgctgaccggtgcggacgcaaccgggctcgatgccggtgtcttcgccacgtcgaacagcaatgccggcgcattcaccgtggccttcaacggcactgcgttcggttcgcagactgctgctgtggagtccatcgcggctaaggaccctgaagccactatcgccaaggggcagatgctcgcgcttcgggacgtgacggttaccgccacgctcaccaatggcaaaacgcgtgtgctggagccaagcgaatacacgctggaaggcttcgacaccaccaaattgggcgagcaaaccgtgacggtgcgtcttgtcgctgattcttcagtaaccgccacgttcaccgtgactgtggaaagcaaccttgcccggttgttctgctcgtccgctgcggcctcgaagtatgagccggccagtagctgggcctccgcttctacggccgacctgacttgcgacaacaacctgagcaccaactggtcgaactggggcaccggcgacacctcgccgtggctcagctacaccttcgataaggcatatcagctgggcaagctcagcgttgcggtggataaggccaagggcgaggccgctccgaagagcttcactgtatcgtacctagctgaagacagcgccacgtggactgatgccacgctgccggcagtcactgtgaatggtgctgctggagccgtgacggaagccgatgtgagcgctctgcccgccaccaagggcattcgcctcaacttcacctacgccgatggcaatgactatgccaagatcgctgaagtacgcatcgccgaaggtgaagcgacaccagagccgcagccgtctagtaacgccaatcttgctgatctgactgtggatggcaagacggttgacggattctccgcggataccactaaatatgccggtgcgctggccggagacgctgcttcttacccgacggtggaggcgactgctgctgacgcgaaggctacggtgcaggtggagcaggcttcgaccgagaacagcggcgtggccacggtgactgtaactgctgaggatggcacggcggaaacctacacagtgacattcggcgaactgcctcagttggccgagcttgctgtggaagcgaccaaggattcctatcaggtaggcgataagttcaacgctgccgatgtgaaggtatccgccatttacaaagtcggcgataccgaaacgctgcgcaagctgattgatccaactgatggtgatctgaagttcactggctttgattctgccaccgcaggcacgaagaccatcaccgtctcttatcgtggcgtgaacgcgacgttcgaagtcacggtcacggccacggaggtcactcccggccctggagagcagaagcccggcgataccaacaatcctggcaacactgctaagcccggtaacactgccacgaataagccggctgctaatggcgctgcgcccctttcgaatacgggtgttgccgtggctgccattgcggtcgtggttgtggtgctgacagctgcggctggtgccttgctcgtcatccgcaaacgccgcgcataaccatggcaactgctgagtggcgtggattgcgttgctattgagcaatctgcgattcacgccactcagcgagcgcacccgagtgcgcccgagcttgcgcaatgcaggcgcaatacagtgcaaacagtacaaagcaacaataatggccggtctgagccagctgctccatgcgagggcagctggctcagaccggccattgtgtctgcaagtacatgcaattagagcatgaacatgtggaagccgttgagcgttactggttgttttgctttgttgttgcgctcagcagtgcgacggacgtccgcccgcagtgtagtgcagcgctccgtgaaccagcgccgatgtgaaatgcatgttgcacatgcccgcttcttctgcttcgtgcgtgcagccggcgatgctgcataggttcataccccgaatcatggtcataccccctctttgggatggcgtccgtgccgccatctgccttcagagcatagcggacaattgttgcattgcctaggcggtacaacgctttctgtggcctgtatcacatccttgccggcgttctgcggcgtggttgggcgtgtacatgtgctcttgtgcggttttgttgtgtgtgatttgggtatacggatagagtttcttctctgcagtggcaagggcctctcggccggcgagccggctgatttctcccatgcgttgctcaatgatttccgttttgcgagtctgaacggcaaaatagctctggagaagtgccacttcttctttctttggatcaccgttttgagcaatgagatagcaggcgtatcgggtgagcttgacgtccgcgatggagcgggtggcaccgctgccgagagtcacgtctcgcgtagtgtcacggaaatgggattcaacggatacgccggaattgtcgcaagcttgcttggctcgtgtaatagctttgctgaagttttcccatctgtcgtaccccatataggtcattagctcgcgtgcataccaatactcaactttggagtcctcggtggtgtgtgcgatagtgctgagttcgctggttttgcgtgtgatttcgtcgcggttcatgggtgtgtccttatgtttttcatgaccattttcgtgactccacgaaaatggtcaaagccaataattgcaatggttttgaagtatgggcgcgctccgcccaactggtctgtcttcgtccgccttttcgaccagatacctcatggagcacaatgccaacgtcgctaccgttggcccagcaaatattcttagacgacgccccgaagtgaatatctatgcggctttcagaatatcaaagagcgtggagtgtgtgcattgtgcgttccaaaaatagtttctagtaatgaattgtttacggtgtgagatattcttggggtgtttgcggcgctctgccgtgtggcgaatgggaatggatggtgctcttatgggatttgagcaggaagcagttagtgaactgtatgccagcgtgtggggcaatcgttcgacgatgcagagggaattcactcgtggagcccatggtgagcagttcgtgctccgggagctgtccatgaaggggacgcaaacgccatcgcaattggcatcggcgctgcaggccagttccggccgcatctccactgtgctgtcgtctctggagaagaaaggctgggtcacgcgtgacattgattccaaggatcggcgcattattcgcgtgaatctcactgattccgggcgcgagcagtctcatcggatgatagaggaaatgcgttccgcaatttgctggattttctcgcaaatgggggagcggcgcacgcgcgaattcgttgacctgatgtctgagttcaccacatatatgtcgatttgccatccgggacagcctcggccgactgctgaacaggtgcgtgaggcattcgtggagcggggcaagcgcgtggctgaacacatggcagctaagcgcgcggagaactaatcggcaaggctaattgaggacgctcacagcgaacatacagaagtgcgtataatatctcacagtgtaagtaatcaaacaatggaaactattaagacatcgtgaaccgataatcaccgataacccagccaacttaagaaccaatcgccaataaccaataaccaacccaaccaacacaaggggaaaccaatgtttcgcatcatgaaatacctctccaaagcggagatcggtcagatgctcatcgccctggtgaccatcgtcgggcaggtctacttcgacctgaaactgcccgactatatgtcagacatcaccacgctggtcgaaacgccgggcagccacatgaaggacatttggattgccggcggcaagatgctgctcatctcgctcggatccgcggcgtgtgccatcatcaccggctacatcgctgcgcgcgtggcggcctcgttcacccagcgtctgcgctcgctcgaattccgcaaggtcgagtccttcggcccggccgaaatgagcaagttctccactgccagcctcatcacccgctccaccaacgacgtcacgcaggtgcagatgttcatcaccatgggtctgcagctcatcgtcaaatcgccgattatggcagtatgggccgtgtgcaagatcgccggcgaaggcttcgaatggacgctcgccaccggaatcgccgtagtgattctgctggcggccatcgtcatcatgatggccatggtcatgccgaaattcaaggccatgcaggccctgaccgacaacatcaacctcgtggcccgcgagaacctcaccggcctgcgcgtggtgcgcgcctacaatgccgaggactaccaggaagccaaattcaccaaggccaacaaggacctcaccgagacccagctgttcaccaaccgcgtcatggcgttcatgatgccgttgatgaacaccgtcctgaacggcctgatgctcgccgtctactggatcggcgcttacctcatcgacgccgccgggctcaaggacaagctcaccgtgttctccaacatggtcgtgttctccaactactccgtgcaggtcatcatgagcttcctgctcatgagcatggtgttcgtgctctggccgcgcgccgacgtgtccgcgcagcgcatcatggaggtgctcgacactgagccaatcgtcgagaacggcaccaaaaccgccgccgacgtggccaaaaccggccagaggggcaccgtggaattccgcaacgtcagcttcacctacccggattcgcgcgaggcgatgctggaaggcatcaacttcaccgccgagcagggccagacggtggcgttcatcggctccaccggctccggcaagtcgtctcttatcaatctcgtgccgcgcttctatgacaccagccaaggccaggtgttggtcgacggcgtggacgtgcgcgactacgacctgaaggccctgcgcgacaagatcggctacgtgccgcagcagtccgtgctgttcaagggcaccgtggcctccaacgtgagctacggcgatcagccgggcgacccggcggaggtcgagatggccgatacctccaccccggccgggcgcaagcgcgaggccgcgttgatcgccgctggcgaggccgcggaaggtgccgatataccggccgagcagctgaatcgcgtcaaggccgccgccgacgtggcgcaggccagcgagttcgtggcgcgcatggacggcgggtattccgccgcgatcgcccaaggcggatcgaacgtgtccggcggccagaagcagcgcctgtcgattgcgcgcgcggtgtaccgtcacccggaaatcctgattttcgacgactcgttctccgcgctcgacttcaagaccgaccgcgaagtgcgcgacgcgctcgcccgcgaggccaaggattccaccaagctcatcgtggcccagcgcatcggcaccatcatgaacgccgatcgcatcgtcgtgctcgacgacggcaaggtcgtgggtcagggcacgcacaaggaactgctcgacaactgcgacgtataccgccagatcgccgaatcccagctcagccagtcggagcttacggcgtagggggctgcagcagtagctccccatgtcaggggctgagccgtaaagggaacagcccagtgggctgttcccaggcgaaggtgagctgataagcgagcgaataaaacagcacagctgactgaggggtagtcgcgtacggcttctcttcctctggcgcttcgcgccacctccctcatcagagggaggtcaatacggacttttaaggagtaacacaaatgccaagaggaccaatgggcggtgggcgcaccaccgaaaagcccaacgacttcggcaaagtcatgggcaagctcgtgaactattgccgcaactatcttcccgtcatcatcatcgcgcttatcctgggcgcggccggcaccgtctgccagatcatcggcccggacaagctcaaggacatgaccaacgaaatcgtcaagggcctgcctgccatcgttaacggcaagccggtgatgaactcggtcgatttcaacgcggtcggccgtatcgcctggactttggtggccctgtacgtgggctacgccgtgctcggctacgtgcaaagctggatgatggccaacgtcacccagcgcaccgcccagcgactgcgcgagtccatctcggtcaaaatcaacaaactgccgctcaaatacttcgacaaggttagctacggcgacgtgctgtcgcgcataaccaacgatgtggacgccatcggccagacgctgggccagtcgctcggctcgctgattacctcggtgacgctgttcgtgggcgcgctggtgatgatgttctacaacaacgtgatcatgaccctgtgcgccatcggtgccagcctcatcggcctgatcatcatgatggccatcatgaagtcctcccagaagtacttcgcccggcagcagatggcgctgggtgacgtcaacggccacgtggaggagatgtacgccggtcacctcatcgtcaaggcatacaacggcgaggccgattcgattcgtcgcttcgagaagtacaactcggacctctacgagtccggctggaagtcgcagttcctctccggcctgatgatgccgctcatgaatttcgtgggcaacttcggctacgtggtggtgtgcgtggtgggcgcggcgctcgcgctcgacgggcagatcgagttcggcgtgatcgtggcgttcatgatgtatgtccgcctgttcactcagccgctttcgcagtttgcgcaggccttccagaacctgcagcgctgcgcggccgccgccgagcgcgtgttcggtttccttgaagagccggagatggaggacgaatccgacaagtccgctttgcttgggaccaacggccacgaagtgaagggcgacgtggaattcagccacgtgcagttcggctacgagccgggcaagccgattatcaacgacttctccgcttcagtctcggccggtcagaaggtcgccatcgtcggcccgaccggtgccggcaagaccaccatggtcaacctgctgatgcgcttctacgagatttccggcggttcgatttcgattgacggcgtggacaccaagtccgtgccgcgctggaacgtgcacgaccagttctccatggtgctgcaggatacgtgggtgttccgtggcactgtgcgcgagaacatcgcctactccaagcctggcgtgaccaacaagcaaatcgaggatgcgtgcaaggccgtgggcctcgaccacttcatccgctcgctgccggacggctatgacaccgtgctcgatgacaagtcgtcgctctcccagggccagaagcagctgctgaccatcgcccgcgcgatggtgcaggacgcgccgattctgattctcgacgaggccacctcctcggtcgatacccgtactgaagagctgattcagaaggccatggatgcgctgaccgtgggccgtacgagctttgtgatcgcgcatcgcctctccacgattcgcgacgccgacatgatcctcgtcatgaaccacggcgacgtgatcgagcgcggcacgcacgacgagctgctggcggcgggcggcttctacgccgacctgtacaacagccagttcgcactcgctgactgacggattgtttcctgcgttagcggattagcggattagctatactcggctcccctctccgaggggagccgtcagcgtagctgactgaggggagcaacccatcggtccacccgagggatgtgatactgatgatttcgtacattagtgtgtgaaaaagccgccgggaaaattgggggattgggcggcggtgcggttggcgttgagaatggcgcattcgaaggggaagtgagcgcgcagctgggtggccggggtggtgaacagggcggtggcgaggccgtcggccagtgtgacagggacgtgtgccgcaacggtgttcgacgaatcgtcggtatcgcggtttgccgttgtcgaggcattgctgccatgcgtcgatgtcttcgtggttatggcgctcgatggcggcgtgacggccacccatgtggcggctacatcgtcaaccggtagtccgtcgatggcgttgagcagatggtgaagttggtgacctgcggcgtcagaccagtggcggcggctgggggagctcgcgcagaatgcgccgtggctgatttcgaccgtacctacggcgttggccggatcggcaggatcttcaagggcgatggtgattggttcgtccgtgtgcactagcaaatcacccccggcgtcgatgacgtattgaatgggttgagggtgacccgcgccatcacccaacatccccgcaagcaaatccaccaaataccccttaccgcacgcgccgaaatcgagcgcgaccggtccgcgcgtcaccagtgttgtgccatgccgctcaacgtcggctgaccaaatggctcgtccgtggatcgcgcctgcatgttcagcggcatctggcgcaggcgtaaacgaatacgactcgtcatagccaagccgaatcaaatcctcgcccacgcacgggtcggtcgccccatcggttgccgcaaacaggcggtcgtacaggccaaacagacccgatgcccagtcgggaaaatcgaacgtgccgccatgtgcggccgtgcgcatccggccgacgatggaatcatcgcggaatcgagataatacaacctcatattcatggatgaacgagccaatacgatcgcgtatctcatcgtccaatacgctctcggtgtgcaccagtaatccggtccccaacgcatcaggaaaagcgtatacgtatggcagttgctcggtcagacttgtcatgcccactatcgtagagcgcatggtgtgccggtgtatactggattttgacactgtgtcaatgttgattcggaggttgtgagaatgggcaatgcgactacagcaagtgtaacgggtgtgcaagttgcaccggcgaagtcagccatcagagatctccccatcgccaaagtgtgggcgtttgcggtcggccagttcgggtgggcgctgctttccggcatcatctccaactggctcgtgtatttctaccaacctgaccaggagaccatctcccaaggtcagaccgtattcgtgccgcagggcctggtcgttctcggcatcgtgaccgtggtgggcggcatcaccgccttcgcccgattcttcgacgcgttcgtggacccggccgtggcgtctctctccgaccgttgcgacgccaaatccggccgccgtatgccgttcctgaaattcgccgccctgccgctcgcggtggtcaccgtgctcgtgttctggagcccgatcaacggcaccagctgggtgaacgcggcgttcctgttcgtcaccgtgatcggctactacatcgccctcacgttctactgcacgccgtacaacgcgctcatcgccgaactcggccacgactccaagcagcaactcaccatctccaccgccatctccttcacttgggtggccggcacggccatcgcgtacgtggcgccggtgatttggggcgcgttcgtgccgatgatgggccgcatcaccgccatccgcgtgaccttcaccatcatggccgccgtggcgttcgtgtgcatgctggtgccgccgctggccatccgcgagaaggactacgtcaactcccatcccacctccgaatcgaccatcgaatccctgaagcagacgttcggcgacggcgaattccgcaagttcgtatgctccgacgtggtctactgggtggccatcaccaccttccagaccggtctgccgttcttcgtgaccagcctgctcaagctgccggaaaccaccacgaccatctacttcgtgctcatgaccggcgtctctgtgctgttctatctgccggtcaatattctggccaataaggtcggcaagaagaggctgctgctggttgccttcgtgatcttcacctgtgcgttcgcatttgccggcgcccttggttcggccgtgctcggcttcattccggcgatggcccagggtttggtgctctcggtggtcggcgcgattccgatggccgcgttcggcatcctgccgcaggccatcgtggcgaatatcgccgacgccagttccaagaccaccggccaggaccgtcagggcatgttctacgcggcccgcacctttgcgatgaagatgggccagtccgtggccatgctgctgttcaccggcgtctccaccatcggcatggcgtccggcgcgggctaccgcatcgccgccgtgtgcgcggccgtgctgtgcggtctgggcggcatcgtgttcgcgttctacaacgagaagaaggtgttgggcgtgctggagacgtgatggcgttgccgggtgccgccgcggtatccatacggagcggtgtgggtgacttgccccgtctgcgacaccgaaacgttaccgtgtcgacacgcgtgcgacacttcggcgtcaaattgcgtttgaccgcactccgtactatattgttgcgagttgctttgcggagcaaagtaacatccaaggggctgtagctcagttggtagagcgcttcgttcgcatcgaagaggtcgcggtttcgactaccgtcagctccacgagaccctctgcattcattccaccgcagagggtctttttatttgtcttcgttgaaattctgccatctcgcgttccaaggggctgatttggggtttgccggaggtctacttgcgtttcgaggggctgatggtcaagtagatatgccgccaaaatggcggaatagcgttgcgtcaaagccgtttgtactggtgcttcaccggatgaggagccccttgaaacggaagtagacttccggaacatgtgaaatcagcccctgcaaagggaaaatgcctcgattccgccatggattgtcgtggattgctctgtggtatgggcaatactgggagtatgacaagcgcagatgagttgaatgagcagtatgacgctgacggtagcgtgacgcaagtgcctgaacgcaatgatgaagttcatgccggcgaatccgccgccacccaatcccgcgaatcggccgtgaccatccccgccggcaccgtggtgctcgccgcaaccccgatcggcaacgttggcgacgcctccgcccgtctggtggccctcttggagcgggccgatatcgtggccgccgaagacacgcgccgcctctacgatctcgcccgtcgcctcggcgtctatgtgaacggtcgcgtcatcgcctatcacgaccacaacgagcgcgacaaggccgatggcctgctcgaccaggtcgaaaccggcgccatcgtgctcgtcgtgtccgacgccggcatgcccaccatcaacgaccccggcttggccatcgtgcgccgtgccatcgaacgcggcctgcccgtcacctgcgcgcccggcccctccgctgtgctcgacgcgctcgccctctccggcctgcccaccgaccgtttctgctacgagggcttcctgccgcgaaagcattccgagcgcgtgcagtatctgcgcacgctgttgcccgaacgccgcaccatcgtgttctacgagacgcctcatcgcattgccgattcgatggacgatctgctggacgcgttcggcccgaatcgcccgatggccctgtgccgcgaactcaccaaggattatgagcagattcgtcgcggcccgattggcgagattcgccaaagtgtgattgatgatccgccccgtggcgagatggtgctggtcgtcgccggcgcgtccaacgaggaggccgaagcggccgcgcccagtacgttgagcgtggatgacatggccgtgctctccatcgatcgtgctttggaggacggcctgcgtatcaaggacgccatcgcgcaagtggtgcaggagcatccactggctgacggatcgttggccaatcgcaagcaggtgtatgcggctgtgctgaaaatcaagggatagcgcagcagccggcgattatctccccgttacgcttccatcgactcgaacaatatttccaacgcctgccggaccccgggcccaccacgctgcgagaccaattccagcaaaggcgcgtcggctttgggattggcaaccagccatttacgcagttcgggcacgtgatatgcgatgtgccagagcacggcaacatccgtatcgggcgaacatgccaccgcgggcgtaagtctgatgggtggttcaggcggcgcggtcatatccgagattgcgcgcgatgcggattcggatgagtgtgccgccgccgcgtggcgaggcaaccgttgcgcctgccgcaaatgccgtaaacggtgagcggtatggcggcctctgcgatgtcctttggcgatgaatcccctcgtcatgcgcattgctccaaagccggttcgtcaatctccttctgcaccgattcaaaaaacatgcgtgcgcgtccggcatacttgtgatgccgatgctccttgacgatttgcagacagtcgtttggccgaaactggtacgcggacatcagttggcacaccagcgcgttgacggtggaaggatcggggatgtcttcaggactcatcaccaggtcgcaagccgtacgggctggcgtggtgacaggcagcccgccgagcttgatgatttgctccggcaacgtcaatcttttgaatacgcggatgcggcggctgacggatgccgagcggaagtgcgatgtggagatcacgtctatggtgcttggaaagtcggggcctcccagccatacccaagcggcggtcatcgaacacaccacagtgccaaacggggcgacctccgcgacgatttttgcgcgaccatacagtgtgcccgaatgctcgatccagtagccggcggaatcgtcgagcttacgtaacgcgccgaaggcggccagacggttaaggctgagcggtcccggcagatccttggtaaacagtatcggcggcaccgcgggctgcgcggttgccggcgaggcgactgttgtgatgttcgtcatcggacctgctgtgatatccatgaccgaacaatatgcagaaatgcggcttgcgcgccaccggataggcgaaaacggtggataagtgcataacttcactaggtgcgcgaatgatgtggataactcggtggatatcgacaggcggaagtgtgtgcggatgtgcgtggacgtgcgtgcggatgtgcgtggacgtgcgtgcggatgggtgcgtggacgtgtgtacggatgtacgtacggatacgtgtgcgaatgcgtatgtggataagcgcgcaagaggtgtacggataagtatgtggggaagttgcgggcggataggtgagtgggatgaggatggcggcgcggcagctatccgggcgtgtccccgccgcgccggataatcaagccttatgagtcatgttttggtgaatgttgcttggccgtatgcaaacggcccccgtcatatcggtcacgttgcaggatttggtgtgccttccgacgtctacgcgcgctacgagcgcatgaagggcaatgatgtgctcatggtgtccggcaccgacgagcacggcaccccgattctcgtcgaggcggagaaggaaggtctcactgcccaggaactggccaaccgttacaaccgcgtgatcgccaaggatctgtgcgacctcggcctgagctacgacctgttcacccgcaccaccaccggtaaccacgagcacgtggtgcaggagatgttcaagcagtgcctggagaacggctacatctacaaaggcacccagcaggtggcgattagcccgtccaccggccgtaccctgcccgaccgctacatcgagggcgagtgcccgatttgccacgccgaaggtgcgcgtggcgaccagtgcgacgcctgcggcaacgagcttgacccggacgagctcatcaaccccgtctccaagatcaacggcgaaaccccgcgcttcgagcagaccgagcactacttcctcgacctgccggcgctcgccgaagccaacaaggcttggctggagacccgcaagggctggcgtaccaacgtcatcaatttctcgcttggcctgttcaaggaagtcaagccgcgcgccatcacccgtgacatcgactggggtatcccggtgccggtgaagggctggatcgacaacccgaacaagaagctgtacgtgtggttcgacgccgtgatcggctacctgtcggcctccatcgaatgggcccgccgccagggcgacccggagaagtggcgcgaatggtggaacgacccgaagtgcccggcctactacttcatgggcaaggacaacatcaccttccactcccagatctggccgtccgaaatgctggcgtacaacggcaagggctccaagggcggcgaaaccggcccgatgggtccgctcaacctgcctgagcaggtggtggccagcgagttcatgaccatggaaggcaagaagttcagctcctcccgcggcatcgtgatctacgtcaaggacatcctcgcccgctaccccgtggacgccgtgcgctactacatttccgtggctggccccgaatcctcggattccgacttcacgtgggccgagttcgtgcgccacaacaacgaggagctcgcctcctcgtggggcaacctggtgaaccgcgtggccaacctcatcaacaagaacttcggcaagattccgccgctggacgaggattcgatgaccaacgaagaccgtggccttctggaagaggcttccgccgcgttcgacgtggtcggctcctccatcgaaacccaccaccagaagcacgccctgtccgaggcgatgcgtgtggtcggcgacatcaacaagtacatttccgccaccgaaccgtggaagattaaggacgaccaggctcgtctcggcaccgtgctgcacgtggccgctcaggccgtgtctgacgcgaaccacctgctcgcgccgttcctgccgcactccgcacagaaggtgtgggaggcgctcggcggcaccggcaccttctcgccgctgcctgagctcaaggaagtcgaggatctcgacaagcccggcttcacgtatccgatcatcaccggcgattacgagctcggtgtgaacgtgcacccgtggaagagtgaggcaatcgaggtcggtgccgtggtgcccaagcccacgccgatcttcgccaagatcccgaccgaggccgtggaagaggagctggctcgcttcgacaaggcactggctgctcgccgcgccgccgaggccgagcgtctggccgccgagaaggccaagctcgccgccgaatgattcggcattgctagctcgtagctgacgggccacctcgcacatgaagtgttgcgaggtggcccgttgccgtatgtgcggtcaagccccgacaatgcgaggccggttgtcggcgggcgtcacaaattcgtcacattccgccaagacttttcccagacaagcacatcaattcgccaagcatggagcggttatatagaagatgtcaacggaatgaagttcataccggtggcgaggttcttcgaaccccataactgaacccttcttctctcttctctctcacccggcggccccctccgccgggtttctttttttaatgctgggaatgccatgggccgcatattgaaaaaggattatggcagagtgctgtctgtttacaataaggcattgctgttctagaaaataacaaagaagggggggactaatgatgtataccgtcacattttcgggcaacctgactcaagcggaatcggccttggtcaagcgaggcaccatacagatcgccgcgttgctggccgcaaaaatcactggccgcggactcatcatcaacgacggtgacaccgaatactcatgggatttcatcctgatcgatgccagcagcgatgagcggcacacctttgacgagaggctattgcggatgctgtccgactacatccacgccggtttccccgatgccgtgatccgccgcgccaagcacgaggctccaaagctcggcaaataatattggtcgcgtggtgagtcccatacttccgtcggaatatcgctatcgcgatatggtcgcatgcctgttgcgcattgaagcgttcgacctatgcgcagttgatgttccggtgatgacggcaaccgattgacgcgattaccgggacagatttcgctgtcccagttcgtgatttcggcttcttcttgggaaccgggacagcccccttgtaaacgcccattatccgtaatcccaaaaccccggaattccgccgatgtacgatggcgaatattgcacggtggggtgataggtgaatgaaattttgtcttggttgctcaaaaaggggcgaaatggagaaccgggacagcgaaatctggcccggtccacacataaatcgattgacatcgctaccgggacatcggacacggacaccgagtcgcgcagcgtcggcgcaacatggatactgtacgactttcgcgataaacgttatattcttcgtcgcctccgccgggcgagctcatcgagtggcgttgccgtcaaagtgaaatcgaatacggcacctcgcaatgccaactgccgcccgacccggtaggcgagttcggcttgggatggctcatcggccatgttcgcggcagtggcgatgatgacgatccaatgatgatgtcgcagcagttcgcgcttgtcgttgtcccgccgccactggtttttgtcggtgcgatgatgatcgccgtcatattcgatggcgacgcgaaattcgggccaagcgagatcgagcgttatcggcgcaccgttgctgaatgtcgcgccgggcaccgtgtaatttgtcacggctggcggaagcccgtatttcgtcgtcgcgatgcgggtctttgattccatcggagagtccacgcggggcgtaatgaatgcaagagcgatcatgcacttggattttgcgttgaatttcgggagtccagtgacttgccgcacgaagtcctgataaatgccgtcagcagtgcggccgttcgccagacccggcttgcgggcgattgccgtaaggattgcgtcgccaagtatgaccagcgattcgagcgatatatgagcggcgagttgtgcccaagtgtgtatcagatccagtgcgtacacatgtttgttgatacgcacattgtgcgcatcgctcagcggcttccagatgtgtggtgtcgttggcggcacgatggcacgtattcgtgtgcggtgtgagtcggagacggtatggagctcggcggggtcgatatcgcaatccttgggaagcggcacggattgcagtgtcagcgatgtggccatgccgaagagcaccggttgcccgagctgttgcgcggcgtccgtgcatcgtttaagcatttcccgcttacgttgggtgagggtttcgctcattgctggcgacacagggcctgtaatcacagttggcgcggaactcgccatacgtggtgatgaacgtagctcaggattgatggtgcgcgcagacgcaacgcccggtgtgtggggccgggtccagccggacggttcgtcgtcgaatacgccgggcggtggagtgggcaatatgtcgttcatgacgccaccgtagcgcagcggtcacgtgctcgctatgaaaaccggggtatgtggctctagcttgcgggagatgtggataactctgtggataactagttcggaacaattagcgaggccggaacctaccggcaattggccgatgatgacggcacttttgctcagctcagccgcgatagtctcgaataggtgcggccgggcgtactcgcataacgtaatgccccttctctctgaacagagagaaggggcattcgaatatatgctcccgccagcggaacgtcagcggcagcggcgggtgagaggctgccaggggtcgatttcgaccggttcggtggtgagcagggcgcgggtggcgtcgtcgaggtattccttgcggatgatgagctcggtgacgtagcggtcgaaccaggcgtcggacatgacgtagtagccgtccttgccggcgtccttgccccagctgttctccaccttccagcggttcggcttgccgtcctcgccgaggttcacgccggtgaaggtcatggcgtggttgctcgggctgtcgccgtattcgaggccgtgggccttgtcgccggtgaattcggtgccgaacagctggtcgacgcgcaccacggactggtcgaagaacccgtccttgcgcagggcgaactgcgtgcagtcgcaggcgaaccagatcgggtggccggcggtgagctggtcaagcgcggctttcttgaacacgtccagcggcacgttgacgaactccatatcgcccgcctcgaccacgttcgcgctgaagcggatgcggtagcgccggttgaacgggcggttcttgagtggggcgttggccagcgtcgcgaaatcgttgacgtccaccggcacgtacttcttgtagaactcaagcggggtgatgccgatctcgcggatctgcgggcgctcgtccttgccggtcttgtccttgtccttatcgcacttgcacgccttggcgtcggacttgtccttgcacttgcaggccttgccgtctgcatcggcctcggcgtcatccttggtgcgcgcgaagaagtcgaacttctccggcggctcgccaagcgacacggcgcagatgcggtacacggtgcccatgtactcgtccttcagcgtgcgcagctcgtcctcgccagcgcccgcagccgaacggcggcgcagctcggctgcgaactcgcgcagcttggagttgaggtactgcttgaaatcatcggaattacgggagttctcagactctgggtaggcgctcttgggcaccagaccgtacttgttcaccagcgcggcgaacatctgccaccagccgccgtcgtcggacgggccccagttgatggcttcgaacagacgcgagtcggtgggctcgtcgagtgtgcgcagcacgttctccaggtaggtgttcgacttctccatcgcatcccagaagaagaggtaggtctcggagaactcgaagtcctcaagattccagcgatgcatgagttcgtaacgcagcgtgttcagggaggcgaacatccagcagcggccggaacgctcctgattggtgatcgaaccctgcttgagttcgatggagaagtcgcgcggcagcgcacgcacgccgcgatagtcggtggccgccttgagtacgccggccgaaaccgccgcgtccgccgcgatcaggttggcgcggtccttgttgaaatcctcggtgtacgtacgcagaagttcgggtttgatggcccgtgcgctggcgtctgtcgtcatgatgcccctgtctgatgctgatgatgctgatggataatccgttgccggcggcggggactgtcaccatccgggccggcggactgctgacacgaaagtataaggcatgtccagcaaaggttcaggaaatacaaaattaacaaacggatgtttgcccaatatgcagtaagtgttttcgcagttttccgtacaggaaaaagtcggaaaagtcaatacccatattccatatattggactcaatttgtggttttgggcgggggaggtatcatttccccagttatttgggaggtggttgggtgttcaagtacatcatcaagcgcattgtgaactacgtgatcatgctgttcgtggcagtatcgatgacgtatttcctggccagcgcattcatggatccgcgttcgaactacatgtcgcgcaatccgcatccgccgatcgcgtcgatcaaccggtcgctcgatctggccaacatcaacgaccagacgccggtcgtcatccgctatttccgctggctcaagggcatcctcacccagtggaactggggcctgagcccggaccagtcgccggtggcgccggccatcgcctcccgtatctccgcttcgctgcagctggtgacgctcgccaccgtgctctccatcctcttcggcgtgagcatcggcgtgtacacggccatccgccagtacaagtggcaggaccgcgtgctcaacaccaccgcaacgttcttcctggtggtcccggccgccgtcatgggcctgatggtggtgctgctggccatcaacttcaacaacatcgtgggcagccgcgcgttctacgtgaccggcctgcactcctaccaaggctccaacccggtgctctgggtgtttgactacctgcagcacctgatcctgcccaccatcgtgatgacgattccgggcatggtgggctaccacctcacccagcgcacgtacctgctcgacaccatgaacgccgactacgtgcgcaccgcccgcgccaagggcctgacgctcaacgcggccattcgccgccacgcgctgcgcacctcgctgattccgaccgccgtggacgtggccttctccatcgccggcgtgttcaccggcgcggtgatcaccgaaaacgtgttcgccatcaacggcttgggcatgtacttcacccagaccatcgccaacaacgacatcaacggtgccgtggccgtggccgcgttcggtggcgtgtgcacgctgaccggcgcgctgctggcggatatcttctccgcctggcttgacccgcgcatccgactgagctgagccccgcgcaaaggacgatcaaacatgatgaacgacaacgagaacatggtctccgacgccgtcgcccaggatatggaactcaccgatccgcagggcagcgaaccgcagtccgccgacgccaagaacgcccaggaggcttccagcaacgacgacttccaccgcaccggccgcatgcagctgtacgtgcgccgcttcatgcgccgcccctcggccgtggtaggtctggtggtgctgatcctgctgattctcttggcgattttcggctcgaaattctcccagtggagctacgacgagcctgatttcgccgccctcgcctcgccgccgtccgcccagcactggctgggcaccacggtcggtggctcggatatgtacgcgatgattatccgtggcctcggccgctcgctgaccatcggtatcttcagctcgttcggcaccacgatcatcgccgccctggtgggcacggccgtggcgttcttcgaaggctggttcgagcgcgtgggcatgtggctgctggatatgctgctcgtcgtgccgtccttcctgctcatcgccctgatcgtcggcatggcggccggcggcagcgactggctgtggctggccatcggcctgaccgcgttcggctgggtcggctatgcgcgtacgctgcgcacgctgaccctgagcctgcgcgaccgcgaatacatccgcgcggcgaagttcatgggcgtgccgtccttcaccatcatcgtgcgccacctggtgccgaacctgggttcggtgctggtcatcaacaccgtgctcggcgtgattggcgcggtcaacagcgagacctcgctgagcttcctgggcctgggcatcaaggcgcccgacacctcgctcggtacgctgctcaacgccggccagtccgtggtacagacctcgccgtgggtgctggtcttcccgtccgtggtgctgatcgtcctgaccttctccgtgcagctgatcggcgacggcctgcgcgacgccatcgacccgtactcccgctccggcggcaaggccgagtgagaggggagacgggcatcatgagcgacgaacgcaacgcaagcaacgtaacaaccaacaccaaccccgacaccacaggagcgcaaggcatggcatccgaaccggtgatttcagtacgcgacctcaccgtcagcttcgcttccgaagccggcaccgtgcgcgcggtgcgcggcatgaacttcgacctgtaccacggcaagaccctcggcatcgtgggcgagtccggctccggcaagtccgtgacctccatggccatcatgggcctgctggacaagaacgccagcgtcaagggctccatcacctaccacggcgaggaattgctcagcaagtccgatcttgagatgagcgagattcgtggcaagggcatcgccatggtcttccaggacccgctctccgctctgaccccggtgttctccatcggcgaccagatcaaggaagcgctggtcacccacaatccgaagatgaccgaacagcagattcacgaccgctccatcgagctcatgaacctggtcggcatcccggacccggaggaccgcctgaagtccttcccgcacgagttctccggcggcatgcgccagcgcgtgatgatcgccatggccatcgccaacgacccggacgtgatcatcgccgacgaaccgaccaccgcactggacgtgacgatccaggcccaggtgctcgaagtgctgcgcaaggcccagcgtgaaaccggcgcggccgtcatcttcatcacccacgatctgggcgtgatcgccggcgtggccgacgacatcgtcgtcatgtacgccggccgcccggtcgagaaggcggacgtcgactccatcttcgaccacccggccatgccgtacaccatgggcctgctgggtgccgtgccgcgttccgaccgcgaacgcaacagccgtctggtgccgattccgggctccccgatgaacctggtcaacatgcccaagggctgcccgttcgcgccgcgctgcccgctggccaccgacatatgccacaccaccgagccggccatggagccggtgccgggccgcccgggccagttcgtggcctgccaccgcacccaggaaatcgtggacaagggcctgaccttccacgacgtgtacacggtggccgaggccgccaagtcgaagttcgccggcatcccgcgcgacgaacgcaagatggtgctcgacgtcaagcacatgcgcaagaccttcccgctgaccgccggcggcttcctgcgtcgcaagatcggcgaggtcaaggccgtggacgacgtgacgctggacgtgcgcgaaggcgagaccgtggcgctcgtgggcgagtccggctcgggcaagtccaccacgctcatggagatcatggagttcaagcagccgcaggacggcgagatcgagatgttcggcaccaagctcgaacacaagattccgcgcgagaagcgccgcgagctgcgttcggccgtgcagtatgtcttccaggacccgatgagttcgctcgacccgcgcctgccgatctacgacatcctggccgagccgatgaaggtccagcactactccaaggagcagatccgcgaacgcatcggtgaactcatgcgtctggtggagctgaaccccgaccaggtggaccgcttccccacgcagttctccggcggtcagcgccagcgcatcgccatcgcgcgtgcgctgtcggtcaacccgaagctcgtgctgctcgacgagccggtctccgcactggacgtgtccatccaggccggcgtgatcaacctgcttgaggacctgcagaacaagctgggcgtggcctacctgttcgtggcccataacctgtcggtggtgcgccacatctccagccgcgtggcggtgatgtacctgggccgcatcgtggaatccggcgacaccgaagacgtgttcgagcacccgttgcacccgtacacccaggcgctcatcagcgccgtgccggtgccggacccgaaggcggaacgcacccgtcagcgcatcgtgctcgaaggcgaggtgcccagccccaccgagacgttcgaaggctgcccgttcatgggccgctgcccgctcatgcccaagctgagcgccgaacaacaggcccgctgccgcggcgaacgcccggcgctgcggccgtatgacacttcccgaccgagcggccatcaggttgcatgccatttcgcatgacggtcggaaccatatagaggaggaaataacaatgaacaagacacgtaagctgaccgcgctcgccgcggccactgcggcgcttgccatgctgcttgccggctgcggcgcgggcaatggcaacggttccagcaacgcctcgagcgccaccgaaccgccggccggcatcgattcgtcgtacaccggcgacctgcccatgccgaaggtcaccgagcgttacgacaaccaccagagccgtgacaacgtcaaggacggcggcacgctgaccctgtccatcaccgaagtcggcccgaactggaactacctgtcttccgacggcaacaccggctacatgtccgagctgtggagctggtaccagcccagcctgctcatgaccgaccaggtcaatggctccccgattaaggtgaacccggacttcctgaccgacatgaagctcgtgagcaaggacccgatggtcgtgcagtacgacatcaacccgaaggccaagtggaacgacggctccgacatcgactggaccgccttcaaggccacgtgggaagccaacaacggctccaacccggactacaacccgccgagcaccgacggcttcgaccgtatcgccagcgttgagcagggcgacagcccgaagcaggtcaaggtgacctacaagaccccgtactacccgtggcagggagtcttcggcgctctggtgaacccgaaggccgccgacccgaagaccttcacccagggctgggtgaagaacccgcacaacgagtgggccgccggtccgtacaaggtcgactccttctccgactcccaggtcaccttcgtgccgaacgagaagtggtggggcaacaagccgaagctggacaagatcgtctacaagcagatggccgacaccgcctccctcaacgccttccagaacggcgagatcgacgccgtggaggccttcaccaaggacgacatcaaggccatccgttccgtcaaggacgcccagctgcgcatcggctacagcaccaagacccgcgtgctggagtacaacggcaagtccaagccgcttgacgacctgcaggtgcgcaaggccatcactcaggccttcgacgcgaacacctacaacaacgtgcagttccagggcctgaactggaaggccgagcagccgggctccgagctgctgctgccgttccagaagggctacgagaacaacctgcccgccgaggccaagtacaacgtggacaacgccaagaaaacccttgaggccgacggctacaagatgggcaaggacggctactacgccaaggacggcaagacccttgagatctccttcactttcttcggtgacgacgccacccagcaggccctcgccaacgcctaccaggcgatgatgaagaaggccggcatcaaggtcaaggtcgtgaacgtggccgagtccaagttctccgacaccgtgtcttccggcaactaccaggtgctgccgatggcttggcaggctccgagcgccatgaccttcgtggcgtccgccccgcagctgtacacctccgacggctcgtccaactactcctacgtgggcagcaagaagatcgacgagctcgtcaagaaggctggcgacctctccgactatgacgagcagaccaaggccgtgaacgccgccgagaaggaagccctcaagctgtatggcaccatcccggtctccaacccggcttcgtacctcggtgcgaagaagggcctggccaactacggcccgtccggcttcgccggcaacctgccgcaggacatcggctggcagaagtgatgacgtctgactgacgtctgacatggccaccgcgccgggaacggccggccgcacgcatcgactgcagggctttcgatgccggacgcggcctgcggcaggttcccggcggggcgtgaccgcggcagcatatgccttactctccttatttctgcatatgatgctgcggttgggaagcctcccgtttgcgcgcgcttatgcgtcgcgcgaacgggaggcttttgcatacttgccgcgattccaccccggcaacgatttgtccaccttgctgcccgcgcgggcggcgacgtgctcgtcgaagcctgatttggagaacagcatgtaatggctggtttcggggtgcagcagtctggcgcgattgcgcagcacttccaactgctgcagaccggatggcatgctgcgccatttgcattcgcagaatagaatcgtaatttacttaattatgattctataatttggtcgactggtatgcaacaggtctcgagcgtgcattgccgcatgcgcaacgtttcgcgcgacacattccggggaatattgcgcttagcgggtcgtgccgcgttgctaatgcggggaacacgcagagttgcgggccgttgcgattggacgcaggccgtctagactagtacgtgtttgcgaaagtcgaacgtgcttcgaccggtgaaggagagctccggtcgtgcgaccaatgacaggcgcagtgcgaagcacggcacggctgatcgtgaatcgtggcggcagcgattgccgcgtgcggcgcaggagcatgccgcaccataccacaagcaaacaatccccaagaaacggtgatcccctcacatgtacgtcgatccgggaatcaataccagcgcaagcaacctcaaatgggtgctgccatactgcaaaccagacctgccccgcgtggcaggcgcgctcctactgttcatcgccaacaacacgatggccctgaccattccgattctgtccggcatcatcgtggaccgcgtcatcgtcggcggacatgccgacgaactgccacgtctgtgtggactgatgatcctcatgaccatcatccgcgtgggcgcgcgatacggctaccagatgtggatggagcgtttcggccagaactcggtctaccgcctcgtctccgacgaatacgagaagctgcacgagctcgacttcacgtacttcaaccacacacgcaccggcgacatcatgagccgcctgacctccgacaccgacgcgatccgccactgcctgagttgggtgagctatcagatcgccgactgcgtggtcatgttcgtgggcgccctgtgtgtgatgttcgctatcgattggcgactcgcgctcgtcctggcctgcgtcacgccgttcatttttgtgctcacgcgaggcctgtccacgcacgcccacccgctgttcttcgccatccgcaactcgctggcctccctcaactccatggtcgaagagaacatcgagggcaaccgtgtggtcaaggcattcgtgcgcgaaccgtacgagaccgaaaagttcgacgagcacaacgacgattacatgcagcgcaacatggccctggcctacaactcgcgcaggtacatgccttggctggacggcctcggcttctcgctgcagctcatcacgctcggcctcggcggctttcttgtcatcaagggctacatgaccctcggcaatctggtgagtttcaactccttcctgtggatgatcgacggcccggtgcgccagtccggctggctcatcaacgactggcagcgattcaacgccagctgcatcaagattcgtaagctgctcaccgaacagccgcgcatcgtggagaagcccgacgcggccgaagccgtcaagcaggcggtcacgatcgtcgagcaagtcaagcacgatgatgaggctaccggagcgcccggggcttccggaacatccggtgcccagcagtccgccgaacgcaagtcctgcccgctgcacatcaagggcgacatccgcttcgaccacgtcagcttcgccttcccggacgacccggagaccccgatcctcaaggacctcgacttcaccgtgcccgccggctccaaggtcggcatcctcggcgaaaccggcgcgggcaagtccacgctcgtcagccttatctcccgcttctacgacccgaccgtgggccatgtgctcatcgacggcatcgacgcacgcgactggccgctggccaccttgcgctcgcaggtgtgcatcgtggcgcaggatacgttcctgttctccgacaccatcggcggcaacatcggttttggtgccagcgatgatagcgacgaccgatatatccggaaaatggcccagatcgccggcgcggacaatttcatcaggtcgatgccgcagggttatgacaccgtcgtgggcgaacgcggcgtgggcctgtccggcgggcagaagcagcgcctgtcgctggcccgcgcgctcgcggacgatccgtcgatcctgattatggacgatacgacctcggccgtcgatatggagaccgaggcggagatccagaagcacctcaaggagatggacggcggcaagaccatcgtcgccatcgcccaccgcatctcgtcggtcaaggattccgacctgattctggtgctcgagcacggacgtatcgtcgaacgcggcacccacgccgaactcgtggccgcacacggccgctactgggacatctaccacaagcagctcggactccagtccggcgccgcacaggggttttagaagaggacttatggcacaacgcaatacattccgcgaggatgaggagctggaggagtccatcaacctccacgacatcgctcgcgtcggcaaatatctcaaaccgtatatggcacaggtggcgcgcattctcgtcgtcgtcatctcgatgagctgcatcgtcgtcgccgtgccgtacctgaccaagatcatgatcgacgaggcgatcccgaacaaggacctcggcaagctcggcatcctcgctgtgatcctcgccgcgctgatcgtgctgtacgagttcgggctgcgctaccgcacggtggcgatcacgcgcgtcggccagctcatgctcaaggacatgcgccgcgatatcttcacgcatatccagacgctgcccttcagctacttcgattcgcgcccgcacggcaagatcctgatccgcgtggtcaactatgtgaacacgctttcggacacgctgagctccggtctgatcaacgtgatctccgacgtgttcaccttcgtgatcactctgatcgtgatgttcgtgatcgactggcagctggccctgtggagcctgatcctgttcccggtgctcatcatctgggtgcgcgtgctgcagatcttccagcggcgcgccttccagaagctctccaacaagcagagcaacctgaacgcctacatccacgagtcgatcgccggcgtgaagaccacgcagaccttcgcgcaggagcaggcccagttcaggaccttccaggagcagcagggcgaggtgcgttccgcgtggatgcacgccgtgcacatccagttcctcatgtggccgggcgtgcagaccatctccgtgataaccatctcgttcatctacttcgtcggcgtgatgggcttcgggggcgtgaacgtgaccaccggcgtgctcatcgcgttcgtcggctacgcgaacaacttctggaatccggtgatcaacatcggcaacttctacaaccagctcatcacctgctcggcgtacctcgagcgcatcttcgagacgctcgacgtcacaccggagatccgcaacaagcccgacgcggcggacctgccgcagatccgcgggcgcgtcgacttcaacgacgtggtgttccgctacgagaaggacggccgcaacatcctcaacctcgtggacttccacgtcgaaccggggcgcacgatcgcgctggtcggcccgacgggcgccggcaagacgacgatcatcaacctgctgtcgcgcttctacgacgtgtccgagggctcggtgacgatcgacggccacgacgtgcgcgacgtgacgctcgcatcgctgcgccggcagatgggcgtgatgctgcaggacaccttcatcttctccggcaacgtgcgcgagaacatccgctacggcaagctcgacgccaccgacgaggaaatcgaggcggcggcgaaggccgtgcacgcgcacgagttcatcatggaactgcccgacgggtacgacacggtggtggaggagcgcggatcgaccctgtcggccggccagcgccagctcatcgccttcgcgcgcgtgctgctcgccgacccgcgtatcctgatcctggacgaggcgacgagcaacatcgacacgcgcaccgaggaggcgctgcaggccggcctgcagcatctgctcaaggggcgcacgagcttcatcatcgcgcaccgcctgtcgacgatcgagaacgcggacgagatcttctacatcgatcacggccagatcgtcgagcacggctcgcacgcgcagctgctcgccgccaagggcgcgtactaccgcctctacgagtcgcagtacgcgatgattcgcgtggccagcggagcgccggaagagtgacgagatgttgcgcacaaggatgcgtttagcggcgtttcacatagcgggtgctgcgaccggcaccgattttgatgatcgtaccggagtccaacagtgatttcagcgtgcgctcaatggtggtggtgctggtatcgggcatgcgagcgagaatatcggccttggagagtggaactagggattgatcaagcagtgcttcaatccgcattcccttggtagctactcgcggtgctccctgcgctctgccgcctgccgtgagattgatgcgttcgtcgaattccttgcacgcggacagtatgatgccaagcaggtagttcgtgaatggcgcataatcattggcgttgtcgtcccatccttgggtgcttgcggccagcgcctcataataagtgcgtttactttgctcgataaggtgttcgatgctgatgtatttgccgaccatatagccattgcggtacaacatcaggagcgtgagtagccgactcatgcggccgttgccgtcattgaacggatgtatgcaggtgaaatcgagaatgaacatggcgatggcaagcaatggatcggtatgtccatctcggattgcttgcgtgtaggcggaacacgcgcgttcgatcagttccggtgtggcaagtgcggacggtggggcgaatcgcacggtgctggtcccgtgtgcatctcgttcgatgatgacgttgtcactgtccttgaaatgccccgcaaaggtcagtggtgtgtgtcggaagaggtcgcggtgcagttgaagaatgacgttcggggtaaccggaatatagtcgtggctttcgtgaataaccgatagcgcgtcacggtaaccggcaatttcttcttcattgcgattgcgcggtgtgactttctccgagacgagatcgttgagcctgctatcgctggtagaaataccttcgatgcggtttgaggcatctgtgctttggatgcgcgcgacggcaaccagcgtccccaatatatccggtctgatcgttgtctgtatgctttgacgcccttttgcctcgtgaatagcggcaagcaaactcgtggtgtgcggggtgagcaacgtcttacctgattcgatgtagtcgaatgatctcatgccgcctcattttctgcatcatacgaacttttctgcatcatattttatcaaaatgaggcagaaaatgggctgatgaggcagaaaaggcggcaggatggcggccatctcgcttgccggttgcgctactttcccgggaatgttgcgctcgtggcaagagacggcaagttcaggcggccgagattggcgatacccgtcgtgtagtcgaacgtcttaccggactgccttacgagcgttgctggcggtagcctacactgagaaacagcctacactgagaaaccatgagcaagcaccaccatcgcgaccgtagctgggccccggcacctgaagcattgccggacgacgcccagaccatcgacaaccacactcacgtggcctccgtaatccctttcgcgcgcgctatgagccatgaggcgcaggagaagggacagcccgaagtcccggtgtacgacgtcgaccaattgctggcgcaggcgcaatctgtcggcattgggggtatcatcgactgcggttgcgagctgccgcacctgatgaccgccgtccagatggccctcgatcatccaggtaacgtgcacgcggcgctcgcaatacaccccaatgagtccgtgctccacgggcatcgcggtgtgccggggccggatggtctgcccctcaaatacaagccttaccatgacacgtctttcgaggacgcgctcgccgaagtacatcgcctcgccaccacataccccgagcaagtggtggctatcggcgagaccggcatggacctcttccgcaccggcgaaggtgccaaggaactgcagcgcgaggccttccgcgcgcatattgccctggccaaggaactgggcctgcccatgcagattcacgaccgcgactcccatcgcgaggtcatcgaaaccctgctggccgacggcgcgcccgaacgcaccgtattccactcgtattccggtgaccgtgagatggccgagatcgcgcgcgaacatggctggtatctgagcttctccggcaccgtgagctacaaaggcaatgacggtatccgcgaatcgctacggattgtgggtctgggccatgcgatggtcgaaaccgacgcgccgtatctgacgcccatgccgtaccgtggccgcaccaacgcgccgtacatgatcccctacaccttgcgggccatggccgatacgctcgacctgtccatcgcggatgtggcgcgcggcacccgcgataccgcccgcgccgtatacggactgtgagggccgggtgtgcggccgtcgcggcgatgtgttgacttgtaaaatttgtcagaattgtgaacgaggtctaccatgatgtacctgacataagcgagggggatgatctccacctcaatggaggactgaacgtatggctgagtcgaaccaaaggaccgcacgcgcccaaaaagcctcaaaggcccagacagcccaggctggcgtcgccaaagccaaggcccgacaggaagaagaagcactgctgagggccgacacctttaccaacgctcccaaggtgtcccgccgcactctcaccaaggaggagcgcgaggcactcgccaagcagagggaagccgaaaccaaggaagccgagaaaatcgccagcgcatggtcgaaaggcggcctcggccgatggtgggcccgcttgcaatccagcccagacaaggttacctggggcatggcgatcgtggcgctcggcgtggtgtacggcgacatcggcacctcgcccctctacaccgcgcagaccttccttgccggtcagggagggcttggcagcgtaaaccgagaggccgtgctcggcatgctgtcgctggtcttctggtcgattacgctgatcaccaccgtcaaatatgtgctcatcgccatgcgcatcgacaacaatggcgaaggcggcatcttcgcactgtactcgttgattcgcaagtacggcgcatggctcgcgattcccgccatgctcggcggcgcggcattccttgcggattcggtacttaccccggcggtctccatcagttccgcagtcgaaggcttgcagaccctgccgccattggaagggttgttcgacgaaaacccaagcctgaccctgatgattaccgtcgtgatcatcgtgattctcttctccgtgcagtcgcgcggcaccgaaagcatcggcaaagtattcggctcgatggtgctggtctggttcagcttcctcgccatcgtaggcgtcacgaatctctctaacgactggtctgtgttcgcggccctgaacccggtgtacggcatcaaattcctgttcagcccggacaatgctgccggcatcgccctgatgggcaccgtgttcctctcgaccaccggtgccgaggcgctgtactccgacatgggccacgtggggcgcggcaacatctacttcacctggccattcatcaatgttgcgctggtgctcaactacttcggccaaggcgcgtggatgttggccaatagcgataacccgcaatacaccgcgatgaagtcgctcaacccgttcttccagatgatgaccccgaacgtgcggtacctggccgtgatcctgtccgtcacggccggcgtgatcgcctcccaggccctgatcacgggcgcgttcaccatggtttccgaggccacccgcctcaactggatgccccatctgcaggtgcgttacccggcccgtacgcgcggccagctgtacattccggtggtcaacggcgtgttgtgcgtggccacgctcgccgtgctcgccatcttcaaggattccgagcatatctccgccgcgtacggcctggcgttgaccattacgatgatcaccaccaccgtgctgctcggcgtgcacatctggcattccggcaagcgggtcggtgccatcgtgttcaccgtgctgttcttggcgattcaggctatgttcttcatcgcgtctatggccaaattcctgcatggtggttggttcaccatgttgctgaccgccgcgattctgttcgtcatgtacacgtggaatgagggcaccaagctcgaacgtgcgcaacgccgtcacatgcggcccaacgacttcctacccgcgctcgacaagctgcacagtgatttccgcatcccgtattttgcggacaacatcgtgtacctgacctccgactcggaaaccaagcgactcgacacggacatcttcttctccatcttcgccgaccaccccaagcgtgcccgtgcttggtgggcagtcagcgtggaaaccaccgacgagccgttcacccgtgaatactcggtggaggacttcggcacgaactacatctaccgcgtgcgcttccgtttgggcttcaaggtttcgcagtccatcccggcgtacatccaccagatcatgcacgacctgtccaaaaccggcgaactgcctaagcagaagtcgatttaccccaaggtcgacgccgatccggacatcggcaccatccgttacgtgctgattcacaaggccctgatgccggaatccaaggtttccgcacgcggtgccctgtcgttgcaagccaagtacgcaatccgccgcatggccggctcgccggttaagtggttcggtctggcaccttacaacccgctggtcgaggtgcagccgctgttcgtctccacccgccgcccaccgcgtctgaagcgcaccgatacggccaagaccatcacgacgcccacgccgactcgtgcagtggccgacccggccgccgtccccgacccgatggacaccacgtccgggctcgggcgattggtacaggagctcgatgccgccgtatcggccgaggaacggaagatcgctgaggccgctgccgccgctgagcagggcgataagggcaaggccaagaacggcaaacccgccgccaagcctcagcgctccgccaaacagaagcgataacataccagtttgcagcggcgctgatgcgctctataaagaatggctataacggtcgccgcacgtcgccgcacggtttcggtaagttgaaataccatgtgcagattactgggatacgcgacggcaggcttcaacctgagcctcaacgcggtgttgggtcgggacaatgtcggcgatttccgcgaactgtctgaaatccacaatgatggctggggtgtagcccagctttccgatcccgccgaagcaccgcacgtgcgcgacggcggcgcacccaccccggaaaccggcacccgaatctacaagtcgaccatcgcggcccgtcatgacagcacgtttgagacgctggccgacgaaccgtctcgcggtgccatctggcacctgcgcttggcaagctccaatctgccgctcatcatggagaaccagcacccgttctatgcgaacggcctgagcttcatccacaacggcgatatctcggacgccaatggccgcaacatcgtcaccaaccgctcatacccggtgaaccacagcgtgctcctctccaccggcggccgttccgactccgctatcttcttcgcggtgattctggaatacatcggtttcggcttcccgctcgacgaggccgtggcccaggccgtgcgcgaactgcgccaagcctacccgaagtccagctacaactgcatgattcagtccgaggaccagctcatcgccctgtgcgccgccggtcgtgagaagaccagcccgcgcatcgtggaaatctacgacgagtacggccgtggcgagcaggccgccgactaccgtgtgatgcgctaccgtgagctgcgcgacgacaacggcgactccgccggtgtggtggtctcctcttccggctatgagcaggaaggctggaacgtgctggagaacgaccagatgatcatcgcctccaaccgcaacggcacctaccgtctccgttccatctgaaatagcttcataagccgtctctgacgagggggccttgagcctcaaatcatccgcatcccatacttctccgccaacgccggaatatccggcacgccatacttggccaccagatccagccatcgttgtttgttctctccgccaaatcgctcggctcgggccgtatacgcctcgacctgcaggaacttcggcggcactgacttgctatggaacttgtcggcgtacatcaccacttcctgctcgagattcatcggcacatagtcggctggtggcaatggcagctcctggcgcaccacatcctcgcgcgtaagtcccacgccggtatggttgcggcagaactgggcgatggactcgtccacgccctcgtcgagcagatactcgtagcccttaagaccgtgcagaatgtagcgtttcttgctgaatttgagcggttcgccgtcagagccgtcatgcttgaacacgcggtaggtgccgatgtcatgcagcagtccgccgatgagtactaaatgctcgtcgagcagacgcggcggcacatgaccgccggtgacgcctgcggtgggcggtacctccgcgtccttcggtaatgtgcagcggcgcgtgaacagcgcgttctgccggcgcacgatctggcagccgatggtcgccacaatcacgcaatgcgtgtgcaccagctcgtacgccgccttggacggcgcgattttgcggtgcaattcgtcgatctgctccagtgtgggaatatatccggtcatgattatcaggtttcgcctcgtacggtcagatttatcctcagattagcgcggcaatgagccgcggcattgaagaacccctgtgattcggcaatacgaatcacaggggttctatggtctgaacatcagatcttgaagagtgtgtcggctgcttcggcgatctcgcgcgacgcagtgagcacgataacgcaatgcttcgggtcgccggtgtgcgccagcttggccagcgcggcgaacacggtcacctcgtcatccgcgttcagccctcgtgtcggctcgtcgaggatcagcacttcggcctcggtgctgattgcacgggcgatggccaccaaacgctgctgcaccaaaggcaatgtgccgacggccacgccgctggtggcctcggagaagccgaccttggccagcagttcgcgggcgatcaccggcttgggcttcaggaagttgcggttggacgcatccatggcgtacagcacgttttgttcggcgtcgagcttcggctgcacggcgtgcagctgcggtacgatgcccagacggtggccgcgcagttccacgggctcgagctcaacaatgttggcgctcttgttcatcaccgtgccagacaccggcgtggccaaaccgctcatcacgcccatcagcgcgcgacgtttggcgtcggcggtgatgcccgaatcggggtcgtcgctgatcagcagcgcgtatgcgtgtccggagtagcagaagaaattcgcaccatcgaggatgttgaccttgcccttggggccggcgaccgtcaccttgttcagggcaaaggtcgggtaggtcttgagcagaatgtcgtcggaaccgccgcccaccaacacgcgatcgatacgcgaggccagcgtcatggtgggttcggccgctttgccctgaggctccgcatgctcggccaatgcgtctttgtgatcggttttggccagtcggagtgtttcgttgacgcgggcggcattgcgctcggtcacttcggcggatgcgttgaccgaagcgatggcgtctgcttcggcctcactggtctcgtcggtttctccggtttcggcagatgccagtgcgctgtaaataccatcgtcaacagtgctttcgtcatcaacgtcatcgaaggtcacgctgaactgcacggagtcagccggaacggattcaatggtgtcgttcgtctcagtctcagaagtcacttcgtcagccgttgcgtcagtggtcttctcgagttcctgatcgttgttcctgtcgctcatgcctgtgcctccgcatcgtcggttgtggtggtcgtcttgttggtctcgctcacggtgccccagtcgccatcggcggcgaacagtttgttcgcgctgaagaacgcaaggcgcagggcggcaagaatcgccaggatcaggattgaacccagtccataccagaccatggtccaaatcaggtccgatgtcaccggggtggcatggccggatgccagagcaggtccgatcggcttggcggcgaacgcgcctccgaccagaccaattacgtagaagggcagggtgacgatgaacacttccagcatgaactgccatcccaaacgcccgcgagtgacgccggacaccagtgccatgccgatctcgtcgtcacgcttgggcgtccacacgcctgacagcacgaggatgagcaacagcacgccgcccacggcaaccaacgcaatggtgccggtcttcgcgcgcgaggatagcgtatccagcggctccagagaagcgttgtaggattccagcgaaggggaagacacctcgtatcccttggcgggcagcttggacttcttgagggtggataccaaggacttgtatgtagcgggatcaccggtgtcgaacaccacgtccagatccggcaccgcccagccggaggcggtcttgtcgttggactgtgggtcgagtccggccttggcgaaggtctgatagttggtgaagatcgcgttctcgcggttgcgggcggccgtcaccggattggcgacggcggattcggatgtgtacttgtagatgccgcgcaccttgagcttggccgtggtctgggcgtccgaggcggccgccaccttgagcgtatcgcccaccttcaggttgttggcggaggcaaacgcttcagagaccagtgcgccggtggtgttcgggttggaggacttgttgtcgtagctcaggtccttgccgtccacgatttcgaaggtaccgaggtcgctggccttggcggcatcctcggtccagaaggctcgccaaatgagctggccgccggtctcatcatcggaggccgagcccagcgatccgccgtccagggccttcaaatcaccgctcacgcgggccggcacggtttcggtaaccgtgaagttcaacgagttggtggccgactggacgagcgtggcgtattcggtatatgaggtccacgtcatgtaatgcttggtggaagccgagtccgtaacggagaccttcttccacgtagccgcagtcgggcgaatggccaacgtggccttctgctgatcgtacgcggtggtgtgtgcgttggtatcttcttgaatgatggccagtccggcgactgtgccgaaggtgaccgccaaggtgatgaacgcggtcagggccgtacgtcctttagaacgtgtcagggcccgccaggcgttgctgaggacgaacatctaattgcctctcccgttctcctaagccgaacaaatcaatacggctttaactattgttgtgtttagtgaccgttttcttgcgcaatactgttatactcctcaatgaagtctgagaacattctgacagcgatgtggtggtcatgaggggatttgcacccggtatgggataaaccctcggtctatttcggtggcatcggtacactggcatgagatatgcgtggcgtcacgtgtgctccggcatgtctgcgattccggattcacccggagtccggcatccggaagcgtggcctcgcgccgctggataagagtatgagctgagcagattttcgggcaggataagtatgcgattcacttcagggcattcgagccataaggctgtggggcgtaggagaagccgtcatgccggtaacgggaaatccaatcgctccgcatctacgaatagcgctgcaaatcatcagacgggtcccgtaaacctgaagactccccagcacgtgggtggcgacggccgttcgctgatcagccgtacgccgatatgggcgcgagtggtggttgtgctgctgctgatgttgctggccagcgtcacctgtgtgggcacgctctacgcggcatccgtctcgagaatggccacggatgcgcagcgtgtgctgacatccgccgaaagtctggccaattcggcacttggctgcggcagcgataagagtctgtcggacatctcccaagagttggtcaatgccaccaatgatctcaatgcggagctgaacggcccgcagtgggacttcttccgcgaccattcgcgatttggcagcgatatcaccgctgcccgcgaaatgctggcttccgtggatacgttggtcaacggtccgttcactgatctgctgaacctgtccaaacgattgcagggcttctccctgaagaatggctcggtggacgtcagcgccctgatggatatgccggatatcgtcaagcaggtgcataaggatatctcgcagcagctcaccaagctcaacaaggtgccgactccgagcgtcgccaaggtggccaccgtgctcgaatccgaaaaggctgcgctcaagaccgtggattcgatgctcagcgaatacgatggcctcattaacttgctaccgcaactgcttggcgaggacggcaagcgcacgtatctggtgatggtgcagaacccggccgagctgcgttcggcgggcggcatggtgggcaccatcgccgcaatcacggcagataagggcacgattaccatcggtgatttcgccaccacttctggttgggacattcctgagaagccaatggatgctacggtgctgaaggagcgccaggtatttggcgacacttttgaccagtacccggccaccacgaccatcgaccccgaattccagcgtgtggcacagatgaacaaatacatgtggctgtatcagaaaggcaacgaagacgagaacgtagcgggtgtattgtcattcgatcccgtattcctccaggcattgctgggagccacaggcaaggtcaagctttcggacggccgagtgctggatggcaccaccacggtgccgttcttcgcttcagacctgtacacggattacccggacttcgagcagcagaacaacttcgtttccgaagcggctcaagcaattatgaaccacgtgcttggtaacgcgaatgcttctaccgcatccccgctgttgaaggcaatcagagataccagcgctagcggtcatttcaagctatggatggctgatccggatgagcaggaggcgctgattgccaccggacttatcgacgataaggccagtggtgagctgtctgctgacagtcaggtgcctgaaaccggcatctatctttcggagctgcagcaaggcaagcaggattggtatctgaagacctccaccacggtcacaaagacttgcggtgacgtctcggccagccagaacgccctgtattctggcgtgctggataagcgcatcacgacagccgtgcgtaacacgcagctgggtcagtttacggaagatcagctcggtgacgaatacacggtcaccttcaccatgaagaacacgctgactaaggctaaggccgaatcgttgcccgatttcgttaatggcggctcggagaatccagtgctcggcggcatgttgtaccgcgtggtgcttaccgccccgtacggtggcgaaatcaccgctgtgcaggctgatatagattcatgggataccaacaccgcgagcctgtatgaccgtcagtacattatgttcaaccagcagtggatcgagcccggaaaagaattgacgattgcttataccgttcgggtcagcagcgatgccacacatccactgaacgtggtaaccacgccggtggtgaatgcggatggcatcgagacgggctccaacggtaaggtgacggatgagtgcccggccgatacgaacggcgccgatggtgcgaacggcggcaagaacgacgcgcataagggcgagtcctccgatccctcggccggcctggacaccttggacaatctgaagagccagatcagctgcccggtcgatctgaagtccctggcgggatccatgtgatgaccatgcccgattccgtttccgacgccgccggcaagccgcgcgacgtgaactacgatctgctgcgcgtggtggcgatgtgtctggtcattggcgtgcatgtggtcaacaactacatgcccgtcaagatgacgctcaccggtcgcgcggaagtggtgcggtttgtgctgttcgcattgttcatggtctgtaatccactgttcatcatggtgtcgggccggttcaacctcacgtttgacgtcaataagccaagtaccgataaatcatcctcgcatgggctcaagccgtacgcgcgctactattacaagcgcttcatctcgctgatcgtgccgtacctgctgtatgcgggaggcatgggattcgtggcctatctggtcgtggaccatcgctcgctgggcggggctgtgtccggtacattgttcgatctgttttccgggtatgacgattccgtctactggttcgtgttcatgcttgccggcttcgtgctggcaacgccgttcttggctgtgatgatgcgcgcgataggccgttcaggggcctggctattgattggtttggccgccgcggtggctgctgccgaacagatctgcaacctcactggatacccgctgctgttcttgcagtcgttcccatggcgaagcctgctgttctattacctactggggtatgtgttggaattctatccgctgtccgcgcggataaggcatgtgctgtacgcgatggccccgtttgcgttggcttggaccgtgggcacgcgatacctgttcccggggcagccggcgcaggtcaaccggacgttgactgtggcgtacgccattgtggtggccgccgtgttcctgttcttccgctatgacgtgcatgtcaaatcagcgcggttgcgcaaggtgattatctggctcgccgggtattcctacacgatttatttggtgcactcgcccctgtccaaggtgctgattggcccgcggattcccgcgcccacggacggatggtcgtacgcgggtatcagcgtgctgatgtttggcgctacgttgctggcggcgctggtatccgcggtgatagccgataccgtggtgcttaagcccgtgcagcgtctgctacggaaggtacggctgtagattcggatgcggcgctatgccacggtatcaaagccaggaatcccagcagcagaagcggggtgaacgtgaatttcgacatgccaaggccggcatcaaacggttcagccgcttccacgcagcgctcgccgctactcgcgagaacacggtcgaaggatcagaaacagcatcagaggcatcggaagcatcagacatatgtcccactatatatatgaggtgttggtggtgattgagcgatatttgaaggcagttctggaagggtcctagatgtatgatttggagaacggttccaccattaatggtgccaacgttcagctctattccagcaacggtactaatgcccggcgttggatgttgcgtaagtaggtttgatgagcatgacttcatctgatgagaagccttgaacccgtgtccacatttatgatggagggcgaataacatcaacgatttttagcacggctttgtctccgtcatttaatttcttggcgctgtcgatgccgctcgcacgtccacacatgaaaagagccatgtcaatcatttgtagcccgtacagcatgcgcgaatcctcccactggaaaggcattttgatgcgtgccaaatcagaggggaaatatccttgcttatccaaggtatgagagatttgtggtacctgtggctggaaaaggataatgagggactccgaaaggatgcttaatggtaggggaggaagaacggtatatcgattcaatcggcttgtcgtatgtggacggataccgattatgcgcttgaggttggtgcgcgtattgagtgtgtggtcgaacaagctgaagatgagtgggggtgtcattgttgacgttcaagaaagtatggcagataccaggtaaatgatttacctaccttcatattttgcggtttgggctgacactaaaagatgggggtgcgactcacggttgcgcccccatcttttagtacgtcgctgtcagtgcctcttgttgtatgcgattttgttggtgtcgatgacgaaggtcttgcggtcgttcttggccatgacgtccaggatgatgccggcgatgatgagcaggagccccgtgatgaccagcatcaccgcgccgatcagcgtggggaagtgggtgaccacgccggtcttggcgaattcgaaggtgacggtgccgcagagcacaatgccgacgatgccgatgattaggcccaatccgccgaagaaggggaggggcttgtattcgcgaatcatgcggaagatggtgctcatcaccttgatgccgtcgcctacggtgtccagcttggacactgagccttcggggcggtcgcggtactggattggcatctcgtagagtcgcaggttgttgttcagcgagtggatggtcatctccgtctcaacctcgaagcctcgcgagagcacgggataggtcttgacgaacgtgaagttgaacgcgcggtatccggtcatgatatcggtgacgtgcgcattgaacaggccgttgatggaaccgcggaccagccggttgccgaaattgtggaacggacgcttgttctcttggaaataagtggatgagaggcggtctccaatcaccatgtcgtagccttcgagcaccttggccaccatggctggagcggcatcggccgggtaggtgtcgtcgccgtcggccatgacgtacacgtccgcgtcgatgtcctcgaacatggcgcggatcacgttgcccttgccctggcggggctccttgcggacgatcgcgccttcggcctcggcgatctcggcggtgcggtccgtggagttgttgtcgtacacgtagatggtcgcatccggcaaggagttcttgaagtcgcgcaccaccttgccgatggtgacctcctcgttgtagcaggggaggagtacggcaatggaggtatcattatttgcttcaggcatatatacaactataacggttccactggtcttagatatatgtcggttatcgcaaagctaaggttgaaatgttgcacaaatacttgggaggcagccattgatgtgggctccatgtatgttggtgttagaaatatgaagctgacaagaaaggccgtcgcatgatggttgttgaagcaaaccggccccgcttaatagaactaatagttagtgtcgtgctcggtgttggtgctgtaattgcggtgatgatccgatatacttcggacattagttatgcgtcaattcagtcgttctgttcgcaggctttagactctgtggccaacaatggtccattggccccatttattgttgtggtggcattggcatttgtaatatatcgatgtataccatctgtctctgccggtaatatgcgcagctatattgtgtcaggcatatgtgcattgttgttgtctctgacattgattgttcccggtcagtggtctgaagggcaagaaagttctactggatatccgtggtattccaatggaataattgcttttgattcgccagtgtattgcgtggtattccttttgcagtggttgactgtctctgcagtgttgtttgtagtattttgtcacttatttgcaattgattcatacaattcgcgtatggttaggttggagaaggatgcaaaattcagcgtaaagacgcgccttgatagttttatttctagccttgatttgaagcctaggcatgtcctcacctattctgtaatactgtttatttgctggattcccatccttgtcatcaatgggccggttattatccctatggataccatggttcagcttattcagatgcgtggtttccgcgtgtgggatccgatgatgatgacttatcttgatgggtatacactctcagatcacaatccgttctttgattctttcatttacggagcttttgatcgtataggactcatgctcggacatgagatgtggggattcgtattatacatatgggggcaagcatttattggtgcgttctcattggtattgatgttggcgtggattaattcgcgaatacatcttaattcaaaaatcatgttgttctttatggggtttgttgcttttgtgccctccttctcatcttatttaactgtgattatgaaggattcaacttggattccttttttcacagtatggatggtgttgtattttgaactagtatataggctaaaaaataagaagaaaattaggtgggaatttgtcttcttgctaattgttgtatccgttcttgcagggttgatgaagaaaacttcaatatatgtgactacgccttcattattcctgttaattattttctgtcgggataaaattaagattgccgcttccgctgttgtgtcagctttgattgccattatattgattccgtccgtggtattcccaataatgaagattgctccaggtggtagccaagaaatgttgggactgccgatgcaacaaatcgctaaagtactacttgaacatgaaggggatatttctcagaaagaccttcacgttatttcggaagttatggataccgaaaaagcgaagaattcatggaagccatcaaccgaggatccagtaaagcaatcgtttcgcactggtgtttctcgttcaggaattatttcatttatcatggtatggttgaaattattcttccgctatcctgcagaatattttgcagcggtgccttttttgcgtaatgctttcttaataggaccgacgtactacacaaacggcagtctgaaatgtgggtgggagcccaatggggggtatgccattctttcgaatgtgcctgattgcagctattcctgggcgcaggagcatgtttccaatccgttgatgaatgtcttgaatcgtattcctcccttttctctgattggcgcagagggtctattcacggcatggataccgttgctatccctagggttttgtgtatacaagcgaaattggaataatctactgctatatttacctgtcctatttatggctgtatttcagttattgcttcctgcgcatcaagtacggtattcactaggtttcttattctcgtttgcgttggtggcagttattccttggatctcgatgaatgtcggaactgttttggctgtaagtacgccatcaactaatggtacgaatgatatctgccccggtaaaaaggattgaatgctatgtggttcatatttattgttgctgttttatgcgggattatactgctttacctaccaggcgcattgctgctgcgttcctttagattgtcattattgggcagttctctttttgcccctcccgtaacagttgctctgtatggggtattggccattatctattcgggtatgggggtgcgctcttcatggatcacactctttctatttccatctttaatcgcgttgatattgatgttggtgtcgtccattatttctcgacgggcaattcggtcgtctaactctgatgcagtggattcgggagccgggctgtcgaggataaatgtatcttctggattgcaggactgccgtcgaaactggttcataatgcttctctatgtggctgttggggtagccgttaccggtcatctattcattaaatgcttggatggggcagattcagtttcgcagctgttcgacaatgcttggcatttgggcatcatccggaaatttgttgataccggcaattactccacgttggtatctggggatattatctcaaccgttggctcaaaattctatccggtgggttggcattcgctggtcgctcttgttatttccatgactggtgcgagcatcggtattgcagaaaatgctgttatcgccatgctgtgcgcgattgtttttcctgtttcgatgtttgtcttattccattgcttgtttgctggccggacaaagctcatagctatttgttcgcttacgccgttgatgtttgccgcatttccgtggcggtatatcacttttggccccctttattccaatttactatcattcgcaataacgccattggcgatgactttattgatcaaacttttggaatccgtgactcagcttaaggatagaatctgtttgggggcactatttcttgtctctattgtcggcatcgctattgcccagcccaatgccgtgttcaccatcggaattcttattgcgccgttcctgtacgcacaaattcctgcgtatcttgagaaggcaaatttctcgtcgcatgtaaagtgcgcgtggtccgttgctgcgtggatagttatatcattgctgattgttgctatatggatgttcctatataaggcacaatttatgcaacgtaccgtgacttggggctggccatcgtttgagggtaaggcccaggcttttattgatattgcttttgttggtttccgtctagctgagccgcagattctactcggacttttagttcttactggagttatttacacgctgttgaggcgtgaacacctctggatttccgtttcttatgccatcatttgtgctctttatgcgttaagttcttccactgacggccgtgcgaagaatgtattgacaggtttttggtatcatgattcgtatcgtttgggtgcctcggcggtgttctttggggcggtgctagcaggtctaggtatttatgtgtgccttacagcagttcagcgcttgttgcgtctgctgtcttcggattcagtgctgaagtatgagcaacgaatgctaactgtcgtaatgattgttgccataaatgttgttgttttcttccctagctattctttaccgggcagatatgatgtcaccaccgctttcggtgccatccgtcgtgacgtgactttttggaattcgctgcaagagccaaaaagctatagtgcagatgaacgtcgatttgttgagagagttaagaaagtggtgcctagcggtgctgtagtgctgaatcagccttatgacggaagtgcgtacgcatacgggcttgacgatttgaatgtgtattacaaagcttgggaaggcaattggatgggcaagcccacccgagagaaccagctgataagcaccaagcttaatgagataacgtcagattcaggcgtgaaagaggctgtaaaaagtacaggcgcgcgctatttgattcttcttgatcgcagtgattatacgaccaattcggaagatccgactaagatgacttcgatgtatgcaagctatatcaagtcttcatggcatggcattgatgcaattaacgatgatagttctggcttcactaaagtgctggaacaaggtgatatgcgtctctatcgtattgactaggaataatagatattgtgcggagaatgatatattctccgcacaatcgatttatctgatcttcgtgagtttcggcttaagtatagaaagtagtggatttataataagcgaatgaatcccccagcttgctgccagcaacacgatatatagggtaatgatctccattggtgcgatgaccatcttgcttaagattgacggtggttcgggaacccgaaacacaaaactccaaagatactgttttacaatgaagttttcatgaatcaggtacacgcctagggtggccggagaaatagcaagaactattcttcccaaaatggagctatgttctaacggttttgtctgagcgacccagataaaaataaccgtaccaatgattaccgcaaatataggtgaagcaccacttcccgcggtaaagaggttagacggatagccaagctcggtgataatgtgggcgccgctgcgaacgatatgtgtacctacagtacaaagtgcgaagcagatgagaatgacaggaaacactatccagaatcgtatagttggaattagctctgaataacgtcgaatgactgaaccaattaggtagaggctgacgaaataaccgatatctgtaaagtattgcagagtaagagggttaagtattctccaaataaaggtaacccatattgttatgccagttagaagcaggaagttacgctttgttagatgttcagctaatacattaataaatggagccaatgccatcataacgaaaaaagcgctgatgaaccagtaagttcccattgtgactgggaacaccgctgcgagtgtattacgtatggttaagaaagtaggtttgtgcccacgtgcaacgattattgcaatgtatattatgtaaatacctgccgtatacaccacaacctgtacccatagtttaatcatccgaggaattggcgaatgagtactggtagaaagaaagtatgcagaaatcagtacgaataaggttacgccgatttgaccggtcatgatgagtgagtcgtgcgcactcgccgcccacgatccagcgcgggcaggatcggtatgcacagcccagttgtctgatgcaaagtaatgggtggcgacaatgagcagcatcgaaaagatacgtaataattcgaatcgccagtcacgttgtttagacgacatcttttcctctccgtgtctttcgaatccttatataggcaatctttccggtatatctgtgtaggattatcccacagcccatactgtttggctttacctgaatgtcgtatggtgtattcgcaaagcaatccgtcaaaattgtgcctactgtctgggcgcgctatacaataaccccatgcaacagtttttccagaccgaacataccactgagggactcttcgaaaaattaagtgagcgtttgagtcgacttgtcacagctgccgtcaattatcactcccttattcaacccggaagaaccttgcattacaaggtgtacatgggcgaggcatggcaatacccgcgtcttacggacatttccacgttaaatggcgtctgcacagatggtgcgactctgctcggtgaattcgacgctatctccacggtgaaccctcaatccaagttttcgccgcattatttcgccggcgatgagcagctgcttgatcagaatgtacggtatctccttttaactccagataatgctactgatgaggatgtgcgggagcatgcgccgaaccaaagtcgggcgagccgactctacaatcggcttgaatacgagatgccggtgacattcgattgcgttcgagaagctcttcgtgctgagcgcgagcgtaagagccgccgttctattgctgagtatcagcccaacacggtggaagtggctaatgcaggcgaaacgcatcacccttgggtggagattcagccaggcggtcgtgttcctaatgcgcctaaagctgttattgtagctatgcattggctgcaggctggtggtgctgaacgttggggtatggaaacgattgccctcgccaaggaagccggtttcatcccgattgtgctcactgattgtgatagtcatcagccatggattactgatccagcgtgcgacgatgctctggtcttaccgttgacacaaccattgcaagagcgcgttggtgatcccactatcctgcgcgcattgttcgagcagtttgacattcgcggcattctcattcaccactgtcagtggatgtacgacagggcatggtgggtgaagcaatatttccctaaaacgtttattgtggattcattgcatatcgttgaatatgtgcacaacggcggttatccctatgaatccgtggcgcgagaccactggattgatcttcatcacgttatctccccgcaattggaacactggctggaggatgtccataagattgctccttccaaggtggttgatgccccgttgattggactcacgtccgactctgcaggcatgcactattctgagcgcaggaatagcgaatgcatgaacgtggcattcgtcggacgcatggctcgtcagaagcgtccagaggcttttattcttgtcgcgagggctttagaacagggcaatcctggcaaattccatttcatcatgcacggcaatggagatatggatgcttttacggaaagactcatcgaacgttatcggctgcaggacgtcatcgagcgtaggcccatgagtatgcctgttgcagatacttatcgcgatgccgatgtgttattagttgcatccgtaaatgaaggtatcacgttgaccacgatagaggcaattacggccggaattcctacgctttctgccaatgtcggttcgcaagaaacactcataccgccgcaggggctgttgcgacgtatgacttcgtcgtttgtccatgacgcaaaatgttcgcttcttcacctgtacgataatgaatcagatcgctacaagttgtgggaggtagagaagcaacgtcttgaagcattctcgcacaaggaaactgctgacagcctgtttcgtcgcctgctgaacgaatggagtaaataagccatgccatctgtaactgctactactgttgccgcagtggtcgtgacatttaatcgtttggaaaagttgaagaacgtactcgctgcattggaggcgcagactcgtcttccggagcaacttatcatcgtaaataatgcctctacggatgatactgctgtatacctcaacgaatatgagcgagactttcctctaaaagacaagacgtcgattactatcgttacattgcctgagaacgtaggcggtgcaggcggcttctcggcaggaatgcgcaaaggctatgagcttggtgccgattttgtttggatttttgatgatgatggctatccacagccgaccgcattggagaagctgttggtcggttatgatcatgcggttgaaggacttggtccagacgttccctatgcgtgttccatggtcaagttcatcgacggcagtatttcggaaatgaataacccaattcctacttgggattggggacgtttgcaggccatgggctatgacaacttagtaatggtcactcagtgctcgtttgtatctgtattgattccacgatgggtcatggaagccttcggcctgccgtacaaggaatatttcatctggttcgatgatgctgaatacacgttgcgcatcactaaggcgtgtcccggtgtagaagtgcttgatagcgtggtgctgcatgatatgggcgtgaaccaaggagtcaattactccatggtgaacgaaaaaaatgtgtggaagttctcttacggtgcacgcaatgagggctcttatcgtttccatcacaggaacaagggcagttacctgatgttctgtctgacggtgtggaacgcaatgcggcgaggtcgtgtaccaaaatcgttgcgattcaggatttatgggcagctgcttagagctattcggttcaacccgaaggtcgattttcctcagcagtaggtaacaatagttgaaagtagcgtgagcatatgggaaagggcattcatgaatcaatattcacgagctctttcccctgcccatgcattcattgaagcaagaagatatgccgcacagtggaaagagtgtgagggtcgggaacgatgatgttaagcgaatacaacggtactgatagagtactgcacttatgatggattttgtcaagaaattgcgggatcggtatcactattcattggtggtgctgaaggaactggtaaaaaccgatttcaaacttcggtaccaagggtcatttcttggcatcggatggtccgtcctacaaccgttgatgctgttttgtgtgatgtacgccgtgttcgccaagttcctgcgcatgtctgacggtactcccacgtatcctgtggtgctgttgatgggcatcagtgcttggcagtttgtgcaggaatccacttctgtgggcctccgagcaattgtagatcgcggcgacttgctccgtaagattcatttccccaactacattgtggtggtgtcatccactatcggcgctttgattagtttcgccatcaactttgtagtggtgttgttgtttgcgctatttacgcacgtgcactttacctggcgtgtgttactgttgcctctcaacttcattcagctgtacatcattgcactcgggctcgcgttgctgttgtcgaccatgtatgtgtatttccgtgacatttcccatatctgggacgtattgcagcaggtactattctacgcgatgccgattatttacccattgtcgatggtaatcgggaataactcgctgcgcggatacggtctgttgattgcaaagattcaattgttgaatccaattgctcaggtgattcaggatattcgtcataacctgattgctccagagacgcaaccaacgatttggacgatgacttctaatccgctattgcgggccgttcctatcgtgttgtctatattaattcttgttcttggcgtgtatgtgttcaaacgtaacaaccgcaagtttgcagaggtgatgtaatgagcgagacctccatgaatatcaataatgaaggaactgcgactaccaccgaacgcagtgatgatgtggtgctgtctgtcaagcatgttggcaagtatttccgcctgccgacggaacaggccacgggactaaagcaggcgtttattaattggactaaaggcattaagggctataaagaacaacatgttcttcatgacatcaactttgatgtacaccgtggtgactttttcggtatcgtcggccgtaatggttccggaaaatccacgttattgaagattatctcgggcatttatgtaccagatggtggttccgtggaagtaaatggtacattagtgccgtttatcgagctcggagttgggttcaatcctgagctgaccggtcgagagaacgtatatctcaatggagccctgtttggcttctcccatgacgagattgcggccatgtatgacgatattgtggaattcgctgaactcgaagagttcatggaccagaagcttaagaactactcatccggcatgcaggtgcgccttgcgttttctgtggcgatcaaggcgcagggcgatatcttggtgctcgacgaggtacttgcggtcggtgatgaggcattccagcgtaagtgcgatgactactttaccaaggtcaagaaagatccgaacaagaccgttattttggtgacgcacagcatggactccgtaaagaagtattgcaataaggcgattctgattaaagatggagacattattgtcaatggcaataaagaggatgctgctaaccgatacacattagagaatctgaaagctgaagcgaagaaacgcgacgaggagaagaaggatgatgatggatatgcagaaggcttgaacagtagatgcccaatattgcgtattaatcctcagacttcattggtctgcaaaagcagtgataccttcagatttgatgttgaatatgacttcaacgaagacacggatttctacttggctattgcattgcatgatcttcgtcgtggtggagtcgcgtatgatacgggctcgaagacactgaagatgaagaaacgcggtcaccaaactgttcattatgagatgccattaaacgtctttaacaatggtgatttccgtcttgtcgcttcgttgcgtacaccgtcggtagccaatccaaaatctactgatatggtcgcgttcactaatgatgccaattcttgtgcattcgttattcgggatggtaggaatcgtgagtatgctctgttaagcgaccgagcgattgaaattactcagattgcataaatgcaaaggtcgagataatgagaatggcactatctcgacctttaataaaagattagctattgacatacttttctagagaggccagtactgcatcatcttgaagatagtgattatcaacgtgttcatgcgaatcaatatcatgcgggatctgcaaaaaatcgccatatagattttgaaggtatttgcgccatgctggcggtgcgggcacatcgaaatcatcaaatctcatattaatagtaggcatccagtcatctatgggataaggtccagatgaatgggtctcgtcgatattctcgatgcctcgcactaagccagatgcagtttgtaaatcatccgtgaaattaatcttttctgaaagtgcccggtagtgttcgtcaaggacatattctatttgctctgctaaagcagaattatcatataaataaggtgttttctcccattcagttcctgtaaatttttttcgaatatctgagacgaagtcgactcgcgcttgggacgtgatattccatgcctctgaatagtttccggttattgtatccagtgggaacaaatcaataaatgttggattcttctcatctctgagtttgaagcgaatctgtttacatggcacataccaatcccagacaactgtcacgtgaaaggtctcatcgtcttggagaatttgctgtagttcagcaagctgcttacgagtaataaaaacatccacgtcatcatcccatggaataatatcattatagatgtacgccccaagaagagtgcccgaacccatccagtatgctatattgtatttacgacatagtgagttaaattctttgaataatttagtctctgcttgttggaataaccgagccagaccgtgagcttttggtaagcctcggaaaaaacgtttctttgcttcctctagattttcgtcagaatgtcggaaaagctgccagaacatcatcatatcgcgagtttgctcataggaatgagcttcatgggattggtctttaagactatcgagtttttgaagaagttcggcattttgtgcctggagtttttcaatggcaccttcaagatattgcatcttgtttatgtttttttgttcgaaggcgtggaaggatcgggatgatacaggtaaatattttttgacctgattgagtaaactcggcatgctttctctttttcttgacacgtttataataaacttattataagctcttccgtcattcggtgttgcttttgtgttgcaccctgtggacgtttgtcgaatggctacctgttgtttgcttcatcttaaagaaatcggtacctgtaaggtaccctttgccggcggtcatgtcgtactggatgagctcatagtcgttcaatgtgttcttggcctgtttggacaggttcttgcgtttgaccgtgttgccgttgcggtccagatatgttgtggacgtgtcggtggtgaacccgcccgcgccgagcacgagtcgttcaaatgagggaatatcggttcgcgcttgagtgaggaatgcgaggtatggcgagaccttggcgttcatgtgttcggcggccatttccatgaagtaattcggagaagtgtaggcggtggcactggcgtccagcttgactccggccgatgctgaagcctggttcgaccagatgaaatagtcggtttgatgcagagcaagtgtgttgttcttgtcttccgcggcggtctgataggaactgggcaggtggtctccgtagaaaatcacggttatgggtttgtccatggcattcagctggttcaggaagtcgattgttgcctgatcggtgatgctcacgccctttgcataggtattgatttgtccgcgttcgtaatcgttcaggttttctgtgacatttgcctggttaaactggttgttgaaataccagttgtcataggtcatgtgattctgcatggtgacgagctgcaggaactgagggtgttcctccgtgttcagctgatcgatgatgttctggtaggaagccgcatcattggcgtacggagaattgtcggttctgtcttgatgcgtgatcgctggcttgctgtctagcgtgtagaacttgttgaacccgaacttcttgtagtttgcgtcgcgcagatacatgttcttgtagtacgagtggaatgtggtggaaccggtcttgtcgtattcggcgttccagatttggttccacgagaacgggttcttctggtgtggcacgagctcttgatacatggattgcatcgaatcgtcgaacaaggcaaggtccagtccggttagggactggtattcgatgttcgcggtgcctccgccatagccggggggagagcataagaccggaggtggtcgtttccttcagggcgcggatgttgggcatcgggtcttcggccaaggcgatgccgggcacgcgtgttgggtcggagaagctctccgaaagaatcatgatgacggtgttatcggtgaggttattagcacgcgttccattaatctggtttgcctcggagctgtatttcttggccagctcttccatcgtttcctggctgtacccctcgggcttatccataatcttcggatgcgtaaggcgcaagaaattgatggcagggccattgttggtggcatcaccttcggcactccatagctgtggcgcatcaccccaagacttcgcccactcatatccccatgcgccaggaatgctgagcgtccacgtaaacgtgcacagcagcgtgatactcattgccgcagcgatgatacgagtgacattgccaataatcgtcttcacgttgcggaatggacgccaccagtggaatggaatcacacaacggcggccgtcaacgaattgcagtatcaggcagataaccgtcagccagatcagcatagtgatggtgccgtctaccaatgcctggctgcttttgggaatgaacgaagtgatttccccctccccgttaccactggacagaaagggcgagttctagtgaacgtcgcaacacctgaacgaccgatggggagaatcaggtgttgcgacgttcactagaacccgcccaaattcactgagcgttcacgggaagggtggttggggtgtgcgggacggcggtggcgcattgcgttcgcggctggggaaacggcagtaagtacgcgggagtctcgttcggccgcgtacatactgccggtatcagatggcgtgcatcggaggatgcgcatcggagagactgcaacctagcccgggtagggactccattgagcgcaccatggggaattgtcggcgtgctcagggcttcgttttctttgctgtgaaaaaacgttgagcaacctatcagtgcccttgtttgcggtacttctcctcagtcccggctttatccggcatccaccatctttcgtgcgcgcggtaccagtcgatggtcgcggccagaccttcctcgaagtcggtgtactttggtgcccaaccgagctcggtctgaagtttagtggcgtcgatggcatagcgcttatcgccaccggggcggtcgttcacatggtcgaagtcgttggcgtcgcggcccatgagcttcagaatcatgcgcaacacatcaatgttgttgtattcgccattggcgcccacgaggtaggtttccccgatgcagccttgggtgagaatcgtccagatggcactgcagtgatcttccacgctgatccagtcgcgcacagccagaccttgcccgtagagtttcgggcgaatgccggcaagaatgttcgtgatctggcgggggatgaacttctccacatgctggtaggggccgtagttattgctgcaattgctgatggtggttttgagtccgtgcgtgcggtgccaggcgcgcaccaagtggtcgctggcggccttggacgccgaatacgggctggatggtttgtaagggctgagctcggtgaatttgcgcggttcgtccagagccagatcgccatacacttcgtcggtgctgatgtggtggaatcgaatatcgtggcggcgggcggcctcgagcaacacgtacgtgccggtcacgttcgtattgaggaatggggaggcgtcgagaatcgaattatcgttatgcgattcggcggcgaagtgcacaatggcgtcaatcgggggtactgcggctgctgagcgttggttcagcccggaaagcagggattccacaagctcggcatcgcaaatattgccatgcacaaaggtcaggttcgcggccggcacaccatcgagattctcgcgcttgccggcatacgtgagcgcatccagaacagtcatgtggacctgcggatggttgcgcgccacccagtgcacgaagtttgcgccaatgaatcctgcgccaccggttaccagaatgtgctgcggcgcgaacgatgggttgggtgccgggacgtttgctgggtcggtggctgattcatcggccgattcggaaacctgttcggaattgttcatatctgccaatcgtaacctgaggattgcctgagtgcgggggtggaggtgttcgtattagcgtgtgtttgcactagttgggtttttggctgtgtttttttcaggtagatggcgatgaggatgagctggaggttggcgaggaaggtctcgtcgagcctgtcgtggcgggtggcggccttgcggtagtgcttcatgcggtcgaagacgcgttcggccatgttccgccctccacggagctcccgtgcggcacatccacggcagtgcgttgacgaacgtgtagttgtcgaccgccacgctgccgcgctggcgcggcaacagatgcgcgaccctcatgaaccggtcaagcgtgatgccataccccggcgtacacatacgacaactatcacgcaaaacttaaatagtataaacacaccctaattcactgcctgataacctcaggaatccgtatggcggaagtggcgtgaatatatgagatggagattacttattccatttcaatggccatctaccgtgattgcgtcgacctctccctatgccgtcccaatcgtcccggtcattccgattgtttcgagcgctccggtagacataccgtgtaaggcttgaaggactttttggccgtgccgcccctccctagtaacatcgtttctcggaaaacgaacatgacttttggaaggttgtcctatggccggtgcgccgaataattctgaaaccgcccagtatcccgatctcgttatcgttggcgcgggcctgtttggcctgacggtggcgcagcaggcggtggagcatacgggtgcccgtgtgcacatcatcgacatccgcgatcacatcggtggcaacgcctactcgtatatggacgaggagaccggcgcggagatccacaagtacggcgcgcacttgttccacacctccaacaagcgcgtctgggactacgtgaaccgtttcacgagcttcacgaactacgtgcaccgcgtgtacgccacgcatgacggcgaggtctacccgctgccgatcaacctcggcactatcaaccagttcttccatgcgcattacacgccggccgaagccaaggccctgattgaacagcaggcgggcgagctggccggcaccgatccggccaacctgaacgacaagggcattcagctcatcggccgccccctgtatgaggcgttcatcaagaactacaccggcaagcagtggcagaccgacccgtccgagctgccggccgccatcatcaagcgcctgcccgtgcgcttcaactacgacaaccgctacttcaaggacacgtgggagggcctgcccgccgacggctacaccgcgtggatggagaagatgatcgacgacccgcgcatcaccgtggagctcggcgtggacttcttcgacgagtcccagccgtacaacaagaccgcgctcaaggccgccggcgtgccggtggtgtacacgggcccggtggaccgttacttcgactatgagctgggcgatctcaagtggcgcacggtcgacttcaaagaagtccgctatgatgagggcgaccacttcggctgcccggtgatgaacttctccgacgcggacgtaccctacacccgcgccatcgaattcaagaacttcaacccggagcgccacgatgcccagaacccgaacaagaccgtggtgtgggaggaatacagccgtttcgccgagcgtggcgacgagccgtactacccggtcaacacggacgcggacaaggcgctgtacgcgcagtacgaggccaaggccaaggccgagccgaacaccgtgttcggcggtcgtctgggcacgtacaagtactacgacatgcacaacgtgatcgacaccgccctgaccgcctacgaggagcaagtcgcaccgctgctgaagaagtagatcgtcgtttcgccagaggattaacgatttagcctgaaaccgactgaatattgctgaggcaataatgccggtttcaggcttctgtgtttttaatgttgcaagtggggggatgacgctgcttgaacatggctcggcttccccagaatgaaaaactggcggaaaggcgtataaagtggcggtagactggcggaaaggcgtataaagtggcggtagactggcggaaaggcgtataaagtggcgaattctgacgttattgagttgatttcttttgccagcctttccgagtcggatgtgaggctacttcgagaagctaattgtattgaggcgaaaaaggccaaagacaaattaccagacagtctatgggatacgtatagtgcatttgccaactctgatggcggtcttattcttcttggtgtttcagagaactcgcgacgagaattgaatgtaacaggggtaacggatgcagaaaagctcaaacgggatttttggaatactgtcaatgaccgttccaaggtcaacgccacagtactttccgaccaagatgttgtgattcgacatggatcgtccggtgatttcatcgtgattcatgtccctcgtgcagggcgggagatcatgcctatatatgtgggcgctgatccttttagccgggaacagcataggggcaccttcagaaggaataacgagggtgactaccattgcgaccgggatgaagtcaaagcaatgtttcgcgatggcagcgacactcctcaggatcttcgtatcgtggaagatttgggtagtgccgcattggattcaggcacgattgcctcgtaccgttcttattttcaaaggattcgcccgaaccatccgtggcgtaacctcaatgacgaagattttctcgtgcgtctgcaggcgctcgctcgttctaccaaagataatcagttgcatccaactattgctggattgctgatgtttgggcgcgaatatgatatcgtgcgggaattcgcaaattatttccttgactatcgtgaagaaattggactcgatcgttgggatgatcgcattacctctactgacggaatttggtccggcaacttatatgatttttggcagtcagtatatggtaggctgcggcaggcggtgccgcgcccattccgtttggacggagaagcgcgacgtatggatgaaaatcccatggaaatcactattcgcgaggcgttaaccaacgctatcgttcatgcggactatatgggtagaagaggcactgtgattattaggcgccaatcaaccatcgagttcaccaatcctgggcggctccgtgttacaaaggccgaggcggagcaaggtggaatatctgatgcacgcaatcctatcctcatgaaaatgttttttctcatcggtatcggtgaaaaagcaggaagtggctttgatgtgatgcgagctggttgtgattctgttggcgcgccgcatccactgctggaagtgctaactcgtcctgatcgcgtaaaacttgtagtacggtacacaaaccttggcggatctgttatgacgccagcaaataacgagtccatgaaatcctggacttccgtgggacacctctccaaatcggaatcagaagcgctacagtatcttgtgagtcaaggcagcatatcaacttccgaattagcggagcatatggaattaggggtctcgcgtgctcgggcactgctgaaaagtctcgttgaagacggctttgcgcaatctcgtggtcgtggccgcgccacacgctacgagccagtcgaggggctgcccgtcttctgacgcaagaatcgctccgcagagagtggtttgaacagctggtttggagaccgcgccaaatgcacaaagtttgagcgtgattggtgttcgtgaagcaattatttgactgaattggtaaagtgccacgtcgcgtcgatgacggggacaaatttcctggggtacttaaggctcgccacgaggagtacagttgtctgtaacgcacaatgtggcgcgtaagacgaggggcgcatctcgcaagtggggtgcgatgcagttgaaggagtgcatgtcatgactgatccgaatgtcaatccgaacggccaggtgccgtggcagcaggctgacgccaatccgactgagccgttaaatgcgatgacggcggaaacgggaaccgccgccaacaatgctccaacccaagcaatcgcagcgggcgagcagcccactcaagcgttcactcctgttgaacagcctacacaggcgtttacacctgccgagcagcccacccagccttttgcgccggccaatcagccggtaccgcctacgcaggctttgccaccagtgactcctgccgctgcgcccgcgcccgcaccggcagcacccaattcgccctatccgggggcggctccggcaggcggatcggttcctccggtctacggcagcgtcagtgctccggtatatccgggcggcggggccgtgcctccgcaaacgccctataacccgtatatgcaaggcggccaaccgaacggccagccgggatggtctggttcttacggcagtgtgccgcctgaagcgaaccagaagtacaacggcctggctattgccggttttatctgctcgttccttgtctcactcctcggtctgatcctgagcatcgtgggcctcaaccagattaagaaacagggcggcaagggcaagggcttggccatcgccggcatcatcatcagtgcggcgggcatggtgatacaggtaatactggtcatcgcgctgatcgtcggcggtgcctcgtatgccagcaaggctatagatgaggcgaaaaccgattccttctatagtcagtcctcttcgggcaacggtgatagcagcgataagagcaaagctcaagataatcttgacgatgcgctggacgacacgttgggcgaaacccatgacgatctaaccgacggcgattatgggctgtacgattcgattcaggatttcgtcgactctttggaattcaaggactccattgaatccgaagcggatacgtttgcagacaccggcatcaccttcaactaccgtgtcgacggtgacaccttggtgtacgagtatgtgctcgacgacagctatgcctcgctaggcgataccgccgcttcctcactggatgctatggacagcacctatcaatccaccgcgaatctgctgggctcgatgtgcaagacctccagcggcaaggcatcattgcgcgtcatcatgcacacgcaaagcggccagtcgctgtatgacaaaacctggaccgaaaagtagcaatcccagcgaacgtgcgttttggtcgattgaaggccggtctgcttgctccttggacggatgcttctgcggaaggaaccgccaaggagtaggcttacaggcatgagactcgcacgtttttctttgaatgattcgccgcgctacgccttcgtgcagaaggacgaaacggacggcaaggactacctcatcgaactggacggccatccgctggccggcgaccaggtcaagcccaccggcactcgttacccggtcgacggcgatggcatccgtctgctttccccggtgatcccctccaaggtttacggtctggccaagaactatgaggcccacgcccagttcatgcacgaggccggccactccgaaatcgcccacgcgccggaagacatggtgatcttcaccaagccgtccacctcggtaatcggccccgacgacccgatcgtgtacccggcctgctccaaggacatgaacttcgagccggaagtggccgtggtgatgggccgtatcgccaagaacgtgtccgttgaaaacgcgatggattacgtgctcggcttcacctgcgtgaacgacgtgacgttgcgcgacctgcagggcatcgaccccacgtggacgcgcgccaagggcttcgatacttcctgcccgcttggcccgtggattgtgatgcgtgacgacctcgactggaaggacgccaagatttccttcacgctgaacggcgaggatgtgccgatggcgtctggcaccaccgcgaacctgattcacggcatccccgagcagattgccgccatttcgtcgttctccacgctgctgcctggcgacgtcatcatgaccggcaccccgaacgcctccggccacctcgacccaggcgacgagaccatcgtgcacgtcgaaggcatcggtgatctgcgcaacgtaatcgttcgggcgtgactcgttctggctcccctctctgaggggaaccgtccaggcggagaagctgactgagggaaccaagaacgcgccttacgctcccggcagaagtgcgtgcagggcggtcatcaccaccaggctgatgatggccgtcactgtcagcgagaagccggcgagtttggcgttgccggtcagcgaatcggtgaacttagttgagaaaatcgtgatcggggcgaaggagcccagcacgatgatctcgcgaatcctcatgtcaaactgccgaccgcgccgagacgccgggacagttccgtgccggcaagccgcagcttggtcttaagcgaccgctcctgttcggggcgcagcgatccgctcacgaaagtgagagccagcccggcgatgggaaagtcgttgtagtcgcgcacagcgacggcgtatgaatcaaagccgggcgtcacgtctccgtgttcctcggcaaaaccggtgcgttgggtttcggcgagcgttgcctccagctccttgggcgatttggggccgatgccggtgcggtcggtgaacgcctgacgattgggatatagcgcgcggacctgattgcgggggagtgcggacagaatggcccgcccggtggcggtcaggtgactgggtaggcgcacgcccacgcctgacactagcggcgggcgatgcgcggcgcgctcctcaatcacataaatgatttcgttgccgtgcagcacggccagatgtccgttttcgccggtctcgtcaacaagacgcgccaacaccggatgcgcgacctgcgatacacgatgttggcgagaataggccgatcccagctcgaaagtcttgagtccgatgccgtacgcgcgctgctcggcaaggcgggtgaccagtccgtgacgctccaaaatctccaacaattggtacaccgtggagcgcggaatgccgagttcgcgagcgagcgtggcggcttgcgtctgaccattgctcgcgatgaactcgaggatgtcgagcgtacggtcggccgccggagccagcgagacacgtggcgcggatgatgatgtctgatgttcccgttctgatggcttcacctgcgcccgcttgacggtacgtggctcggtgaaggcgtattgctgcgaggcatggctcatatttccatcaccttacatgtctgagatttcagacacaagatggacgaagtggcttatggcgggcatccgactgaggtgaaatggccaaggtttgattactcggggagcgattggttgcgtttgcgtcgcctgctgttgatgggcaggtgcggtgagcgaatgcgggcagtcgcggatccccggcgaagcatatacggcatatgccgcatatgtcgtatatgcggaatgcggcacatatatagaaaggtatgagcatggcagagcagacggtcaccgtaggtgttggagcgctgagcatcgaggacgttatcgccgtagcgcgcggcggtgccaaagtggcgatttcggacgaatcgaagcatgagatggcgctaagtcgcgcggttatcgatcatttggccgacgacaccgtgccgcattacggcatctccaccggattcggcgcgctcgcctccacttccatccccaaggaacagcgcgcgcagctgcagaaaagtctgatccgctcgcatgccgccggtgccggaccggaagtggagcgtgaggtggtgcgcggcctgctggtgctgcgcctgagcaccctgtgcaccggacgcaccggtgtgcgcccggaaaccgcgcaggtctacgccgatatgctgaacgccggcatcaccccggtggtctacgaatacggttcgctcggatgctccggtgatttggcaccgctcgccgcctacgctttggtggcgatgggcgaaggcgaggcccgcaacgctgacggcctcaagatcggcggcggcgaagcgctgcgtgcggccggcatcacgcccgtcgatttgaaagagaaggaaggactggcgctggtcaacggcaccgacggcatgctcggcatgttgtgtatggccatcaccgatctgcgcctgctactcaagaccgcggatgtcgccgccgcgatgagcgtggaaggcatgctcggcaacgaccgcgtattcgccgccgacttgcaggcgctgcgcccgcatcgcggccaaggcgattccgccgcgaacatcgcccgcatgctcaaggactctggtctgattgaggccggccgcccgggctccaccgtgcgtgtgcaggacgcctactcgctgcgctgcaccccgcaggtgcacggcgccgcccgcgacaccgtggaatacgcggcctccgtggcgggcgtggaactcgcctccgccatcgataacccgtgcgtcacgctggacggccgtgtggagtccaacggcaacttccatggcgcgccgctggcctatgtgctcgatttcctggcgattccgaccgccgacgtagcctctatctccgagcgtcgtaccgaccgcttccttgacgtggcgcgcaaccgcggcctgccggcgttcctggctggtgacccgggcgtggactccggtttcatgatcgcccaatacaccgctgccggcatcgtctccgaaatgaagcgtaacgccgtgcctgcctcggtcgattcgattccaagctccgccatgcaggaagatcacgtgtcgatgggttgggccgccgcccgcaagctgcgccgatcgattccggccttcgcgcgcgtgctggccgtggaactgctgtgctcctgccgctccttcgacttccgcaagccgtaccgtccgggtgcggcgggcgccgccgtataccacgtggtgcgcaagtacgccaacgaaatcggccccgacgtacgcgacacctggaccaccccgcagattgagggcgttgccgaggcgattctctccggcgaagtcctcgccgccgccgaatccgccgtcggcgcactgaagtagcggctgtccaagctcccttatcagagggagctaccagtcaccctccccaccaaaatccaaaacttgagtcatatgcactcaagttttgggaatagaatgggttccaggtcggttgaccatatcagacaacgacaagctgcggtctgtcgcaacgctcgcagggctttcgaagcccgcgagccgcactgcgcagaccgcatgatatggaggaatacgatatggaacagaagttcaccactatggcccaagaagccgtcggcgacgcgattcagagtgcgtccgccgcaggaaacgcgcaggtcgagaccctgcacgtcatggatgcgctgctgcgccaggaaaacggcgtggcgcgctctctgatcgaggccgcgggcggggacccgcaggccatcggcgcggcggtgcgcaacgctttggtcgcgctgccgagcgcatccggatccagcacctcgcagccacaggccagccgccagctgaccgccgccatcgcccaggctgagaaggaaatgcagcagatgggcgacgaatacgtctccaccgaacatctgcttatcggcatcgcggccagcaagccgaaccagtcggccgaaatcttggagaagaacggcgtcaccgcagcctccctgcgcaaggccgtacccggcgtgcgtggtggcgcgaaggtcaccagcccggacgcggaaggctcgtacaaggccctagagaagtactccaccgacctgacggccgccgccaaggaaggcaagctggacccggtcatcggacgtgaccaggaaatccgccgcgtgattcagatcctctcccgtcgtaccaagaacaacccggtgctgattggcgagcccggcgtcggcaagaccgccgtcgtggaaggcctggcccagcgtatcgtggcgggcgacgttcccaccaccctgcaaggcaagaagctcatctcccttgacttgggctccatggtggccggctcgaagtaccgtggcgagttcgaggagcgcctgaagagcgtcctgaacgaaatcaagaatgcggacggccagatcatcaccttcatcgatgagatccacaccatcgtcggcgcgggtgcggccgagggctccatggatgccggcaatatgttgaagcccatgctggcccgtggcgagctgcgcctgatcggcgcgaccacgctggacgagtaccgcgagaacatcgagaaggatccggcgctggagcgtcgtttccagcaggtgttcgtgggcgagccgagcgtggaagacaccatcgccattctgcgtggtctgaagcagcgttacgaggctcaccacaaggtaacgatcggcgacgacgcgctggttgccgccgcaaccctctcgaaccgctacatttcaggccgtcagctgccggacaaggccatcgacctggttgatgaggcggccgctcacctgcgtatggagctcgactcttcgcctgaggagatcgatgagctgcagcgcaaggtgacccgtcttgaaatggaggaaatgcagctcaagaaggccgaggaccccgcgtccaaggagcgtctgggcaagctgcaagccgaactcgcggacacccgtgagaagctcagcggtctcaaggcgcgttgggatgcggaacaggccggccacaacaaggtcggcgacctgcgtgccaagctcgacgacctgcgcgtgcaggcggataagtacacccgtgaaggcaacctcgcggaggcctcgaagattctgtacggcgagattccgtccattcagaaggagcttgccgccgcggagagcgcggatgctgaatctgctgatgccggcgcggccaacccggccgatgagccgatggtcccggaccgcgtggacgccgactcggtggctgagatcgtctccgactggaccggcattcccgtcggccgcctgatgcagggcgaaaacgagaagctgctgcacatggaggactacctcggcaagcgcgtgatcggccagaaggaagccatcgccgccgtgtccgacgcggtgcgccgttcgcgtgccggcatctccgacccgaaccgtccgaccggatcgttcctgttcctcggccccaccggtgtgggtaagaccgaactggccaaggcgctcgccgacttcctgttcgacgacgagaaggccatggtccgcatcgacatgtccgaatacatggagaaggcttcggtctcgcgcctgattggcgcggcgccgggctacgtgggctacgagcagggcggccagctgaccgaggccgtacgccgccgcccgtattccgtggtgctgttcgatgaggttgagaaggccaatccggagatcttcgacgtgctgctgcaggtacttgacgatggtcgcctgaccgatggccagggcaggaccgtggacttcaagaacacgattctgattatgacctctaacctcggctcgcagttcctcgtgaacgaggacatggacgccgacgccaagaagaaggccgtgatggacgctgtccacatgaacttcaagccggagttcctgaaccgtctggacgacatcgtcatgttccacccgctcacgcgcgaggagcttggcggcatcgtggatatccaggtggctggcgtggctcagcgtctgaccgatcgccgcatcacgctggacgtcaccgactcggctcgcgaatggctggccaacaccggttacgacccggcctacggcgctcgtccgctgcgccgcctggtacagaccgaagtgggcgaccagctggcccgtatgctgctggccggcaaggtccacgacggcgacaccgtgctcgtcgaccagaccggcggcgaacatctggagctctccgcttgggcgagcgaccagatcgtctccgacgatccggacgtgagcgtgggcaacgtcaccgaagacaagtgacaatcactggctccctctctgagcaaagctgtcagcgaagctgactgaggggagttcgggctggcgagcttcactatattggctctcctctgaggaggagagccttttcgctaccatggtgctgaacttcatacgaggagggccagtgactggacgattcgcgccgacgccgtcggggcgcatgcatatcggcaacgtgtacgccatgttgggtgcatggctttcggcccgctcgcgtggcgaccgcatgctgatgcgtatcgaggacgtggacaagccgcgtgtggccgccggtgcggaccagctcatgatggatgacctgcattggcttggcctcgactgggatggcgaaccgatgttccaatcccagcgcactgaacgatacgaatacgctctcgaatgcctgcgctcgcaaggtgtgctgtacccctgtttctgctcgcgtgccgacattcgcgccgcctcggcccccaacgagggcgacggcttcatggtgtaccccggcacgtgccgccgcctgctgcacgaccatcccgacgaggtccgtgcccgtttggttcgcggcgaccagcattccatccgtatcgccatgccggaatcggcagcgggagaaaagcaacgtacagtgcctgacgattccgctgcgctgttgggagccgtgccgccggaacggcagggcgatgccggaatcgttgatggtgtcgcatgctttaacgaccgtgtctatagtccacagcactacgatttggcccgcgaggtaggcgattccgtgattcgccgagccgatggactgttcggctatcaactggtcgtggtcgtggatgacctcgatatgggtgttgatgatatcgtgcgcggccgtgatctgctgcgctccaccgcgctgcaaatctggattcgccagtgtctgttggctggcggctttgagccggaatgcggcaacacggaaaagcctctcgccgagcaccccgagtatgcgcacctgccgcttatcgacaatgcggccggccggcgtttagccaagcgcgaacgttcgctggatatgggagccttgcgcgcccgcaacgtaacccccgagcaaatcatcggatactgcgcctggctgctgcgtcggcaacccactccaattccttgcaaacccgccgatctgctggcagatttcagctgggagccactgcgcgccaaccacctggaccgcgcgctgaaaccggatgatccaaccactccacaatggctggcagaagcgttaggctagaggcagcccaacaggaaggattccaatgtcgtcgaagctctggagaaacgtggcgctggcaggcgtggccgccgccggtgctgccgtgtgggccgtggccccgcgcacgttcaatgacaagcgtcgtaatttcgtgccctccattccggaggtatggtatgcccatcgtggcttgcatgatgcgggttctggtttggtcggctataccgatatcgctgattatggtggggataatccggtcagcgcccaagccgataccactgagcgatccatcgccgaaaacgatgattatgtgtcgcttgcccgtcgcatggctgtcaaggccggctacggcagtgcggatatgaccggtccgattgctcccgaaaactcgctggccgcgttcgccgccgcctgcgaggctggctatggcatcgaactcgacgtgcagcttacgctcgacggccaagtggtcgtggtccatgacgccgatttgttgcgcgtggccggcgatccgcgccgcatcgaagacctgacttacgacgaactcacccgtattccgctcttcccgaacggcgagtcaggcgatttgaaggccgaaccgttgccgggtgccgacgcgaacccgccgctggtggtcacgccgtccgccgcgccgaaggggtactaccagcatgtgccgctgttctccgatgtgctggacgtggtggccggccgggctccgctgattgtggaatacaagttcagcaacaacagggcttgggatgagcgtagcgaagagctcatggaaaagggccacgccttgcttgaggcgtatgacggcccgtacgtgatcgaatccttccacccgggcgcggtgaattggtacaaggagcatcaccctgaggtgtgccgcggtcagctgagctggccggcgaagctgagcaagaatggtgcggctgaatgggccgccggcttactggcgttcgactggctgtctcgtcctgatttcgtggcttatgactggaccggtggcgcttcgccgcaagtcaagctcgctcgttcgatgggtgcgatgccggtttcatggaccgtgcgcaacagcgatgaactcgcccagtgcgccccctacttcgaccgccacatcttcgaagcgttcgtccccgacgcagtgtgaggttgagggcgttattgatgcgcccatggggcggttacaggctcatcgggcggtaacttgcccatggggcggtttgaagaatatgtgaaaccgcggaattaagccattttggcataccgccccatgagggttttacggccccatggggcaattaccgccccatgggggatttcccgccccatgaggtatggcgttttacttgtgatacggctcgccagcgttgattttataagcgcgatagatctgctccagcagaatcacgcgcataagctgatgcgggaacgtcatcttcgagaaactcagcagaaaatcagcacgacgcagaatcgcgtcgtcaaggccgattgaaccgccgatgaccagctgaatatggctggtgccacgcaatccaaggtcgttgattttggcggccaactcttcactggacagctgcttgccattgatggcaagggcaataacaaacgcgccgtccttcagatgcttggcgatgcgttcgccttctttggccttgatctgtcggtcaacgccttcggaggcatggtcaggcgttttctcatctgccacttcaatgatgttgagcttgcagtagcgcgaaagtcgcttggaatactcgtcaatggcgtcgcgaaggtaacgctccttcacgcgccccggcgcaataatgtcgatttgcatagatgttccgttatgctggctcccctcggggaggggagccagggaaatcagtcaattacgccatagagacggtcaccggcgtcgccgagtcccggcacgatgtagcacttgtcgttaagacgttcgtcgaccgcgcacaccacgaccttgaagtcgatggacgggtcgatgtgctcctcgacgtacttgatgccttcgggggccgcgatgatgttgatcgcggtcacgtccttggcaccgcgctcggccaggtagtgcgtggcggcgaccagcgttccgccggtggcgagcatcgggtcgatgaggaagcactggcggccggacaggtcctcgggcagacggttcgcgtacgtcacctgctgggtggggtgctcctcgtcgcgcttcatgcccaggaagccgacttcagcagtcggaatcaggcgggtcatgccgtcgagcatgcccaagccagcgcgcagcaccggcacgatgatcgggcgcggggaggcgagcttcttgccggtcatcggggcgaccggcgtctcgatcggcgcggccactacggacaggttgcgggtggcctcgtaggcctcaagcatcacgagttcggagacgagctcgcggaaggtggaggagggggtgttcttgtcgcgcagcacggtgagcttgtgctcgaccagcggatgattcaaaacatggagttccatgattcccagcctagtccaagtttgccgacctgccgaattggtaatggcgcggcttgctcatcggattggatttgtgggtgattcgactttttgctgcgataggccagttgcagcaggacaatgccctgtccgtgtcgagatctgcctctgatacctctgagggggtaaagcgtaaaaacaacacggtgtaaaacagggaatgaaactggtataaaaccgggaatgagataggcgtaaaatcgggaatgaaactggtgtaaaatctatattgttagaacgatagaactgggaaaggctgcaatatgaacgatttgagtggtcgtgatggtaccttgaccaggcctgattatcgttcacgcgtggtagatagcagattaagcaaactgctcaaggcgttcggtgcggtggaaatcgttgggccgaaatggtgcggcaagacatggaccgcgctctcccggtctcgaagcgttgaccgtctggatgatgtggcagttttcgcggccgcccaaaccgatcctgcattggtgctgatgggggaggagccccatctggtggacgaatggcaagatgtaccgcaaatttgggatgccgctcgtcgccatatagatgacaatgcgaaccgcaaggggcagctgattcttacaggttcggctattccaaaggatcgtgacgccattcatcacagcggcactggtcgcattgctcgtctgcgcatgtggcccatgagcttggctgaatccggagaatccacgggcgcggtcagcctatccgatttgttcgaggggaaattcgagcctgccgaatgcaatacgagtatcgaagacatcgccagatggtgttgccgtggcggatggcccgcgaatcttgagctagacgatgaattcgccttggaaatcccgggcgaatatatcgcaagtgtgctggatatcagcgtgccgaagatgaagaagaatcctgaaactgcacgagctttgatgcgagctcttgccgtgaacatctcgcaggcaccaaaatatgcgacgctggctgcggatatggcatatggcgatgagcggcgtgagccggatacgcagacggtgaagagctatttggaaatgttcaaggacttgtaccttctgacggatttggagggttgggaaccgccactccgcgcaaagagtcgtgtgcgaaccaagcccaagcgatatttcgtggatccttcgttgcctgctgcggttttaggtgccgcgccgaatactctgatgcgcgatacacagacgctcggcgatctgtttgaaacgctgtgcattcgtgatttgaatgtatatctgtcggctatgccgggtgccgggaatcgcattgcgtattaccgcgatgacaaggggcttgaagttgatgtcattatcgagttgtctgacggcaggtggggtgccatcgaaataaaactcagtgaccttaaggtgaacgatgacaatgcggataagctcaaatccttccgcaacaaaatctgcggcaatcccatggctcaggtccgagaccccgaattcatgatgttccttaccggccgaggtgggaaggcctatcgccgcaatgacggcatactggtcgtgcccatcgcaacgctcggggcgtgaatctggtaaaagaaaagaagcgccgaaccgcgaaagcgcctgtcggcgcaagggccgctcgcggcggcaaaaaatggagcccggggcttaagcacggtccgacgcggatacttagtatagcttgcgatgggtctcgccgcgccggggaaggggtggtgttggccggtagctgattgttggggtgcggtcggtgggtttctccctcagtcatgggcatcgcccgtgacagctccctcatcagagggagcctggagcggggttactccaaccgtccgcgacgccagaggttggcaccgtgctggaaatccttggcggtggccatgaggctgccggcggtgtgcataaggcgggcggctttggtgcgtacggccttctcatcggcatccgaggagaaggcgccgttggcctcggcccgggtcaccatgcgccgcgcctccacgcgcaagcccaacgccaccacatcggtaaacgccgccgcacgctcaagcgccacggcaaaatcgcccacaaaagcaccggagagaatcgaatcggccaatcgcacgatgtcatcttcactgggagcctgatccacgccggcgatggcggaggcggtagtggccaccggctcacccaagcgccacagatgcgcgattgagtcgcgattcgatcgcatccacgtacgcaacatatacagtcgccacagcacaccaggcagcgaatccggctcggcatcgctccacagttcggcgatttcatccacgccgaccgtctccaccaacgtgagcacccgctcaacaaccgccgggtcttcgctatggcgcacacgatccagcaatgcggcagcggacagatggctcatctcgctcaacgcttgcgggtccatgccgccggccaatccatcggccacagccgggtcgagctgagccgggcgcgaaggacgcgaagaacccatgcgagcaggtccgaatgccgctccggccgcacgcaacgagccgaagcctgggcccagactgccggcggcaccattgtgcgcggcatgagctgcggcggcagcggccgaggagttggatgaatcagggaatgcgggtctagtagacaagcggttgaaccttctgaatatcgatgattttgggaccatgaggcgtcggagtgacgaacagcgccgccgcagtgccggtcggcatgaacggtgtcttggcgattaggcgtttgctcagagacggcgcaacgcacatgctgcgcaggtgttcgaacataccaccaatcaccggccggtgcatgcatatcgctatgggctgacggcgctcaagcgcgaactcgatttcgctgagtagacactcccatgcggtgtccggcgcagcggcgtatgcatcttcggtgagcggatcgagatgaaccatgtctcgtccggtctgccacgcgaacatctccaacgtctcctggcagcgcacccaaggcgacgtggccagtcgggtcggattgaaacacgccagctcgcggttcagcgcgtatgccgcagccgcgccgcgcggcgtgatcggacggttcgcgtccgaacccttccacagcttgcgcgcttccgctttgccgtggcgcacgataatcaccggcacggcgtcaagcgcgccctcctgcacccgatcaacgaatagcgcgaggatgtccttatcggtggaatggctgagcttcttgcgggcctcggccggcgtcagccacaaaacttcgtcgatttcgccgatgtccgcccgatgcaccgggccaaacgcatgggtacgccgcaggttgtcgatggcgctgatcggcgtggccatccagaactggatatgcttggtatccgccgaccgatccttggtatggcgctgtttgctgccttcttcggacagcgggtactcgatgtcgcccagataggggccaagttccacggacaggcccgattcctcgccgatctcgcgtacggcggcatgccggtgtgattcgtttgggtcgaccttgcctttcggccagctccagtcgtcgtatttcgggcgatgcacgatgcacagttcgatgcggttgagtacgttgtccgccgcggccgggctgtcggcctgcgccgggtccggggtgggagccgcgtccgatgcgccgtgtgctgccgtggtctcgccgtcagaatccgcggtattcgcgatgatggtgccatcggtggcaatattggatttcgctgatggagacgatgcctgcgtcggctcggcatcatccttccaccggtacagaataccgccggcggcttccacgattcgtctcatactgttcgtacccatctcttgtattgtaggtcacgttggaccgctgctacgtagtttttgcgcgctgaacaacgatgcccggcatcctctcgaaagaggagccgggcatcgtaaccaccctcagttagcttgcgctgacagggagcatcgaatgaaatcagttgtgcgaattggggcggcgctgatgcttgcgaatcagatattcctgactgtcgaccagcgggcggccctcgtcgtccttggtgtgcagcacatacgtgccgtcgggctgcatgtgccagctcatggtggagtcggccatctgcaggtccacgtacttgatgagcccgtcgacctgctccggggcggtgacacgcaccagagcctccacacggcggtcaaggttacggtgcatgaggtcagccgaaccgatgtagacctccgggccggaagccggaccctcgccgatctgcgggccgtccgcgttgcagaaggcgtagatgcgggagtgctccaggaagcggccgagaatcgaacgtacgcggatgttctcggacaggccgggaacgccgggcttcagagcgcagatgccgcgttcgacgatgtcgatcttcacgccggcctgagaggcacggtacagggcgtcgatggtcttctcgtccacgatggagttgaccttgatcttgatccaggcctccttgccggcgcgggcggcgtcctcctcgcggcggatgcgctgaatcaggccggtgcgcacggtacgcggggccaccagcagacggtggaagctggacttcggcgcgtaaccagagagctggttgaacagacgagtcagatcctggccgaccaccgggtcgcaggtcagcagacccagatcggtgtacagtcgcgcggtcttcgggttgtagttgccggtgcctacgtggcagtagcggcgcagaccgtccgcttcctgacgcacgacctcgatgagcttgcagtgggtcttcaagcccacgatgccgtacaccacgtgcacgccggcgcgttcgagcttgcgggcccacgcgatgttggcgtcctcgtcgaaacgagccttgatttccaccaaagccagcacctgcttgccggcatgagcggcgtcgatcagggcgtcgatgatcggcgagttggagctggtacggtacagggtctgcttgatggccagcaccttcgggtccgcggcggcctgcgcaaggaaggcctgcacggaagtggagaaggagtcataggggtgatgcagcaggatgtcgcgctcgcggatggcagcgaaaatatcctgtgcgcgggaggactcgacctcggcgatctgacggttcgtggtcggcacgaacggacggttcttcaggtccgggcggtccacgctgccgagctcaaagagcacggtcaggtccagcgggctgggcagacggtatacctcgtcctggctcacgccgagctggtcggcgagcagctgggagaggaaggggctcgtggtgtccgtgatctccagtcggatcggcggtccgaagcggcggcgcagcagctccttctccatggcgttgagcaggttctcggcgtcatcctcttccacgtcgatgtcctcgttacgagtcacgcggaaggagcgggcctccttgatgatcatgcccgggaacagggattccagatgcgcggcgatgagcttttccatggcgatgaagccgtaacgctcgtccttggactcctcatcggtcatgtcgtccaccggcaccaggcgcggcaggttgcccgggatcttgacgcgggcgaagtgcgacttgccggaggccgggttctccacaatcacggccaggttgatggaaccgccggaaatgtaggggaacgggtgggccggatccacggcgagcggcgtcaggaccgggaacacctgctggcggtagtagcgcgagaggcgctcctgctcggaggatgtgagcttgtcccacgtcagcaggacgatgcgctccttctccaattccggcagaatggtgtcgatcgtgtaatgtgcgtgctcgtcttgcagacggtgtgcggtctcgctgatcgcgcgcagctgctgacgcgggctcaggccggcggcagacggcacggcgatgcccgagtcgatacggcgcttcaggccggcgacgcggaccatgaagaactcgtcaaggttcgaggcgaagatcgcggcgaagttggcgcgctcgagcaggggcatgtcttcgttctccgcacattcgagcacgcgctggttgaacttgagccagctgagctcgcggtcgaagaaacggtccttgggcagcggtgcctcgccttcctgatcgacgcggcggtcgttgttgtcgttttcggcaatatgctctgcgatttggctgcgcagaattgccttcgagggtgcgtcaaatatctgtgccatagcttatatcgtaagctttggcgtggccggaaaacgactgaacgcgccagaattcaacgggtgttcatgttagttcggtgttggttggttttgagtgtgctagcgtcgctcgcgacacgccgtgagcggcggtgaaacgaacgaaatcgaacatcggacgggttcgatgtgaacggttcagctcgttttccgatagccagaaagtgcgattgaacagttgtgataaaaaacgcacaacgactctctgcaggttgcgagaaacgggagtgatgaatagattatgaggtacaagaacaactgaacagagcagagcccacaaatagtgtatggtcacgaggactgttacgttggacgggcattggaaagacttaccgttacaacgatgatgttgtgcagagattctgctccagtagttgaacttgtagaaaaggcccgctccggcgggccttttcgtttgtgtgtacagtggagggcatgacggaaacacagcgtacgccagaggggatgtcgtcgaaacctcgtatcaagccggccgatgccgaagacggccgtccggtctctatctctgcgcgtctcggacgactgcaattccactattccggcaagttccgcgtgctgcagattgccgacattcaggatgggccgaaagtctccaaagacaccatcaccctgattgaggccagccttgatgccacacggcctgatctggtgattttctccggcaaccagatcgccggctacgatccggcgttcgccgattcattccgtaaacgtcgctggtgtgacgaacctattgccgaatccgcgctgaaccatacccgagcgctggtgcgcaaggccattggccagttcactgagccgttggcggcgcgcggcattccgtgggccgtgacgtacggcaaccatgatttccaatgcgggctaagcaatgcggaactggacggtatctatcgtgagttccccggttgtgtcaatccgccgagtgagaccttgccgaaccagattgcatacacctgtggagcgggtggcgctgtgcagacgccgtctggtgccactggctccggtgcgggggttaccgcgaaggctgatacgctgggcgtcgttgacgatgctggtgccgatgctgttgtgccttctgctgtgtcttcccccgcatccgcagtgggttccggtgaaccaggcaccttcgcgctgccggttatggacgttgaccatacgcgcaatgtgctgggtctggtcattcttgactccggcgattacgtgcatggcggcggcttcggcacaccatcgcccgcagcgctcgccttcctgaacgccgtgcccgaccgtatcggtgcgaaatcaatggtgttccagcacatgccgatgcccgagtattacaacgtgctgaagccggtggcggccaacgcggcgtttgccatgcagggctatcgttcgcacgccgatacctactacgtgctggacgaattgcaaacccagcccggcggatatttgggagaaggcatatcctgccctgatacgtcaggcgaattcgaattgctgcgcgaggggtatttcggcgtcgtagctggtcatgatcatcgcaacggtttcgtcggcgaacatgagggtctgttgcttatcgctacgccaacctgcggattcaatacgtacggaccggctccggccaaacgtgccacgcgattgatcgaatttgatatccggcacccttacgagccgcgtacgcaattgctggagttcggcgagctggtgggtaagcccagttccaaacgcgcctacacctatgcggtgaaccaaaccgcgcctggcgagggtgagggcgatgatttgctgcgtaagccgtcgctatggagtcaactgtccggtttattcaggtaactgttcctgatagaggcgggaagcggcgcgaagtattcgaggtttcgggggccttccgctgtgtattagtggcagaaatcccgcgtctcgacggatacctcgcgggatttctgccggttgggctatcggttggattgactggtatgtttcagcgaacggctttgaccagtgcctcggtgaggtacttgccggcggccatcaccagcggcgcataacggcgtccgggagcggcgcccatgcggccggtcgggccggaaatcgagatggcggcgatgacctggccggaggcgttgcggatcggggcggaaatcgagcacacgccctcttcgcgttcgttcacggactcggaccagccgcgcttgcgtacggcggccagcttggtggcggtgaacttggcgtggcgcaatccctggtgcagacggtcggaatcctcccaagccagaagaatctgggcggcggaaccggcttccatcgacagcatggcacccaccggaatggaatcacgtaggccggaggtgcgttccacagcggcgatgcacacgcgctgatcgccctggcggcggtaaatctgcgcagactcgccagtgcgatcgagcagggtctgcaggatcgggccggcggcggtcagcagacgatcctcgcctgctgcggcggcaagttcggcgaaacgggagccgagtacgaatcggccatgctggtcgcgcagtacgaaacggtggcgttccagtgcaatagccaaacgatgtgcggtcggtcgagcgagaccggtggcggccacaagctggcccagcgtagacgggccggactccagtgcgtcaagaatctttacagttttatcaaggacgccaacgccggaatggatttccccatcgtccttggcggtggtgtcttcaaccggctcggactcggtcaagctgttgttcaatggctcttcttgggaatcagtcataataagggcgattatgccatctcacatagtgaaatagcaaattggggaagtgtctcacagggtggccatgaagttgaaagggcgttcgtggatgccgaagagacatgtctggagcggaaccgagtcatgactaggtcatgttcgagtcgtatccgagtcatattgaggccatcatttgaccgtatctcaatatccggcatgctcatggccgggcccatcgcaagcacataggctaataccatgaacaaggcgcgaacacaatacctcgcgcggaattttttggaggaatcactatgggaacgacactggccgagaaggtctgggccgatcatctggtgcgcaagggcagcgacggagcccctgatttgctgtacatcgatctgatgctcatgcatgaggtcaccagcccgcaggcgtttgagggcctgcgcttggccggccgcaagccgcgtcacgtggatcagctcatcgccaccgaggatcacaacacgccgaccgttgatatcgatcgcccgaacccggacgagacgagcgcgttgcagttgacgactttggagaagaactgcaaggagttcggcgtgcgcctgcacccgctgggcgacgccgatcagggcatcgtccacgcgttcgccccgattctgggcctgacccagccgggcatgaccatcgtgtgcggtgattcgcatacgtcgacgcacggcgcgttcggcgcgctggcgttcggcatcggcacttccgaagtcgaacacgtgatggccacacagacgctgtccctgaagccgttcaagaccatggccgtcaacgtcaacggcaagctgcccgcggacgcgaccgccaaggacatcattctggcgatcatcgccaagatcggcaccggcggcggccagggttacgtgatcgaataccgtggcgaggcgattcgcaacctcaccatggacgaacgtatgaccgtgtgcaacatgtccatcgaggccggtgcgcgtgccggcatgatcgcgccggacgagaccacattcgagtacctgaagggccgtccgcacgcgccggaaggcgagctgtgggatcaggccgtggcgtactggaagacgctgaagaccgatgacgatgccgtattcgacaaggtggtggatattgacgccaccaagctcggtccatatgtgacgtggggcaccaaccccggccaaggtctgccgatcaccgcctccgtgccggagccgggcaagatcgccgacgccaccaagcgcgccgccgccgaacgtgcgattgcatacatgggtttgaagccaggcatgccgatcaaggacatcgccgtggacaccgtgttcattggttcgtgcaccaacggtcgtatcgacgatttgcgccaggccgccgcgattatgaagggccaccgcaaggccgagaacatccaccgcgtgctggtggtgccggcctcctcccgcgtgcgtttgcaggcggagaaggaaggcctcgataaggtgttcaaggactttggcgccgaatggcgtaacgccggctgctcgatgtgcctgggcatgaacccggacaagctggtgccgaacgagcgctcgatttccacttcgaaccgtaacttcgagggccgccaaggcaagggctcgcgcacgcatctggcgtcgccggccgtagccgccgccaccgccatccgcggcacaatctcgtctcccgccgatctctgagtcaatacacgtgagccccctctgacgaggggctgtcagtcgaagactgactgggggagagatccccgaaaggaaaattgttatggaaaaactcaccacactgaccggcgtgggcgtgccgctgcgccgctccaacgtcgataccgaccagatcattcccgctgtgttcttgaagcgcgtgaccaagtccggcttcgatgacgccctgttctacgcatggcgccgagacccgaacttcgtgctcaacaagccggaatacgccggtaagggccagattctggtcgccggccccgaattcggcatcggctcctcccgcgagcacgccgtgtgggcgctgcacgattacggtttccgcgtggtcatcgcgccgagcttcgccgacatcttctacggcaacaccgccaagaacggcgtgctggccgcgattatgccgcaggagtccgtcgaactcctgtggaagctactggaggaagagcctggtcgtgagatgactgtctcgctggagacccgcactgtcacttgcggcgacgtgaccctgccgttcgaggtcaacgattacgtgcgttggcgtctgatgaacggctacgacgatatcgatctgacgctgcagcacgaggacgacatcgccgcctacgaaaagatgcgcgccgaaaagttccccttcaagcccaagaccattcccgccaagcactggcccgaagaaaaaatcgagtccgcccgcgagccggaggacgcagactggacagggccgttgaccgatcgaggcattatttagccgcgatcggcctgccgagctgcgacagcagcgaggccagcattgagcctcgccgaaaggcgagtccataattgcaggcccagggccgttggctctgtgtctgattgagattattgggtcgctcgcatcgcatcagacaaaggtctcactggctctcgccagtgagaccttttacgtatagggtcacttcacgcaatcgtctggttccaatgcggcaactcgcttagcatcccaaatacttccaccaacaacgcgagaaagtgccattccctcctatctcttctagggtgtgtttgcactatttaagtttgcgccaatatcaccgtacgaatcgtagtattccagacacgtactttggctgggcagctccgacgttcatcatctttgtggtagccaatgccgctttcgccattatttcgtttgtcggcgcgatgatgggttgagtgtgcgtgtgcgcatgcaggttggcttatcgttgaagcatgagtgattttgagccgttttacgatgtcagccgcagttacgaagacaactatgagcaagggccgttcggcgcgttcgccgaggcgctgaaggatggcaacggtgccgatgccgccggaaccaccagcgagggtgccttggccacctttttgggccagccggtcaacctgcctttcggcattcccgcaggcccgctgctcaacagccgtttcaccacggccgctttccacatgggtttcgatctggcgacctacaaaaccgtgcgttcgcgcgcctggggctgcaacccgttcccgaacgtgctcgccgtacaccccaagtcggcggacggttcactgacgccgggcagcgccgaactggacgaaggcgtgctggccgacaccaactatgaacagccgatttccatctccaacagcttcggtgtgccctcgcagagccctgacgtctggcagccggacatgcgcgccgccatcgaggccgccggtcccggtcaagtgctggtcccgagcttccaaggctcgcgtgtggagggcatgagcgaggaggaatacatcgccgaccatgccaccaccgcccgcctggtcaaagaaaccggtgccaagcttatggtgatgaacaccagctgccccaacgagggccacaaccgcctgctatgccacaatccgctgctcgtgggccgcatcaccgaggccgtgaagcaggagatcggcgacatcccgctgatggtcaagctcgcctacatccccagcgacggcgaccttgaactcatggtgcgttccaccgtgggccacggcactgtgcagggattcagcaccatcaatacgatttccgccaaactggtcgatgccaatggcaatcaggccctgcccggtgcaggccgtgatcgctccggcgtgtgtggcaatgcgattcgtggtgccggcctcgacatggtcgcccgtctggccgcgatccgcgagaagctcggtcttgatttcaagatcaatggcgtgggcggcgtggtttcgccggccgactatcaggcatacagaaacgccggcgcggattcggtgatgtccgcaaccggcgcgatgtgggacgccgagctggcccacaagatcaaggcgagccggtaaatcggctccaaaacaagaaacagcctgtacgggccgtgattcccagacaattcccagccagtgcccacgttgcattgaaactggtgttgttatatgtaatcacggccgaacaagctgcataactggcctttcgctgtttggtgtgggtgggtctgtcaggtggtgacggtgctgaggtcgagtttgccgcaggtcaggtagatcatggtgctgaagtagcccatgttcttgaatccgcgggctcgggtcttgacgttctggatgacgctgttgagtccttcgaggatcgcgttggtgtaggggtggtcgaagtaggcgaggatgtcccgccagtggcggcgtatctggcgggcgaactctttcatgggttcgagtcgggagcgcgtcatccacgagcacagacgcttgagggccgtctcggcctcggctcgatcggcgctggtgtcgtagatgtcctggagggtctcgcgcatctgacaggcgcgtccggttttcaatcgtcgccgttgcaggctgcgcttggtttccaattgcaggccggtcaggttcgattcgttcctcaaccacaggtacttggtccgcttgagcagcgcgttgccgcgggcctcctgtttgcggaccttgtcgacggcctcgttggcgtgtttgatcacgtggaacttgtcgatgattctcgccgcgttgggcagccgctcgcggatgcccttggcgaaccccaggctcatgtcgcaggtaaccagacgcacccggtcgggatcgccgttgtgatccatgaaatcccgcgcgaaccgtttgatcgtggtcgagtccttgcccgggaccacgcagattacgttgcgctccaccaggtcggcgaccacggtgatgtaccggtggcccttccggctggtctcgtcgatgcctatggcctccacgcccgtgtagtcctcgtaaagcctcgcctcgtccacgtaatggcggatgaaccgccacaggcgggtgtcatgttcgccgacctgctcggcgatgtccgcgaccggctggcttttggccagctccacgaccatcgcctcgaacaggagcgtgaacccgcttcccggcctcgcccacggcaccgggaccgcgtgcacgccgtgggcggggcacgtcacgcgcggcacgcccgcgtgaatgaacgccttgtactggaagaagttcagatgccgccacacgcgctccctcgcgtcatgcaccggacacgcggcctcgccgcaccccggttccgggcaggggaaccgcgaacccgccgcgaacccgatcgcgatatgcagttcccgtctgccgtcctcctcgtcacggaactccacgcccgacaccctccacgggtcaggcagttgcagggcggcggtgaacaacgacgtggtatccatacccccaaactacccgaccagcaccaccacccccccgacccactcacccacaccaaacagcgaaaggccgcataacttaacctctttcttcttctctcctttctctccccggcgcccatcacgccggggtttctttttgcggtgggtacagccgtcttactcggccgccgccttcatggccacggcgccgacgtagtagaccggcttgtcgaagttcggctggaacaggaagtccacgttggcgagctggtcgatggtgaagccggcctgaatcgccatggaaatcacgtttgccgcgccggagatatcggccttggaacagaactggccgcccttgaccttgcgggtttccgggtcccaggtcagaatcgacgtgactggggtggtggtgagcatgaagtccgggcgataatcctcggtgagcgaggtctcgcggaccgtgagcccgcggcgttcggcaccggcgcgggtcaggccggaggcggcgagcgagagatcgtacagctgcacggcggacgtggcctgcgtgcccatgtacttcacggtcggcgtctcgatgttgcggcccaccagcaggccctggcgcaccgcgttggtggccagcggaatgtaatcgtgctggccggtggggttgtagaacacggtggcggagtcgccggcggcgtacacgcccggcgtggacgcctgcatgtagtcgtcgaccacgatcgcgccgttcggcagcatgtccaccttgcccttgagcaggtcggtgttcggcaggaagccgacggccagaatcgccatttcggccgtgtactcgcccttttcggtgaccacagtgacggtgtcgtcgtcattgtcgcggaactcgaccaccttctggccgagcgcgagcgtgacgccgtgctcctcgaacgcggccgccacctgatcggtgatggtcttatcgaaattattggccagcgggcgatcaaggccgtcgaccagcgtggtcttgacgccggtgacgctgaactgctcggcgatttccgcgccgatatagcccgacccgatcaccactgccgacttggcggttttcgccttttccttgatggcgatggcgtgatcccagttcttgcacagcagcacatgcgggctgtcgatgccggggatcggcgggatgaccgggcgcgagccggtggtcacgaccagtttgtcgaaagcgagggtctgttcggcggggtctccggcctcgtccagcgcgcggtaggtgagggttctggcgtcgaggtccacggacgtcacgtcggtgcgcatatgcatggtcgcgccggcttcggccagagcggcaggggaggagtagaacattttcttcgggtcggatacgtggtcgcccacccacagggcgatgccgcaggagaggaaggacagcgtaccgttgcgctcgaaaacatggacggtccaatcggggtgctcggcgagaatcgaggtggtggcgaacgtgccggcgtgcgtgcagccgatgacggcgactgtggtcatgaatgctcctttgcttgtggacatggcgtctgatgccattgccctgaatcgtagcgtagaagtatggagaacgccgtggcggcaaatgtgaggaagatcacgttatcggtttgattcgacgggggtatgggatccgttgtgcacggtgatcaaagttcggctggggtgcatttcacggagtcggcacatggcttatggcaaactggacggtagcattttttgaatcttgattgattgaggagagtggcgtggctgagaatccggatgacgtgttgcatgtcgagggcggcaagcctttgaatggcacgatcaaggtgcgtggcgcgaagaacttcgtgagcaaggcgatggtcgccgcgttgctggcaccgggcaagtcggtgctgaagaacgtgccggagattcgtgacgtgcatgtggtgtccgatttgctacgtctgcacggcgtggacgtggatgtggacggtgcgaacggcattgtgaccatcgacgcctcgcgtgtgcagctggccgatgtggccgacgtggatacactgtccggttcgtcgcgcatcccgatcctgttttccggcccgctcgtgcaccgtttgggtgaagcgttcattcccgcgttgggcggctgcgcgattggcggacgtccgattgacttccatctggagacgctgcgcaagctgggcgccacggtggacaaggaacacaaggacggcatccacatcaccgcgcccaacggcctgcacggcgcgaagatccacctgccctacccgtcggtgggcgccaccgagcagactttactggcggccgtgctggccgagggcaagaccgaactgtcgggcgcggccactgagccggagatcatggatctggtgtgcgtgctgcagaagatgggtgcaatcatttctgtggacgttgatcgcaccttccgcatcgagggtgtcaaggaactgcaggggtacacgcacacgtcgctgacggatcgcatcgaggcggcgtcctgggcgtccgccgcgctcgccacgcacggtgacattttcgtcaagggtgccacccagccggagatgatcacgttcctcaacgtgttccgcaaggtgggcggcaaattcgaggtgacggacaagggcattcgtttctggcatccgggcggggacttgaagcccgtggcgatcgagacggacgtgcatcccgggttcatgaccgactggcagcagccgctcgtggtggccctgacccaggccaacggcctgtcgatcgtgcacgagaccgtgtacgagaaccgtttcggcttcaccaagccgctggtcgagatgggtgccaccatccagttgtaccgcgagtgcctgggctcgctgccgtgccgtttccggcagcgcaactacaagcattccgccgtgatcttcggaccgaccccgctgaccggacgcgacatcgacgtgccggacctgcgtggtgggttcagccatctgatcgcggccttggccgcgtcaggcccctcggacgtgcacggcatcagcctgatcgaccgaggctatgccgacttccgcggcaaactcgaagccctcggtgccgacttcgactaattcggccgttcctcggctcccctctttgaggggagccacaattttgttctacaacaacccgtccgcctcaagtgcggcggccatgcggtcgaagcattcctccagtagcgggtagggcatggcgaagttcatacgcacgcaaccgcgcccgacctcgccgcattcacggccgtctgtcaacgccacgttggccttcttaaagaaatagttggccgggtcgtcaatgcccagtggcgagaaatccagccacgcgatatacgtgccctgcggctccacatagcgcaccttggcgaatctcgtgcgcatctgctcgttgaccagcgcgatattgcgctcgatgtacgccatcacgccctcgaaccatgccgcgccgccgtcataggccgcagtggtggctatggcaccgatggtggccgtctggtgctcggaccattccgcgttcctcatccacagttccagatcgtccggattggtgagaatcacctgcgcgcacttggtgccgggaatattgaacgacttcgaggctgaagtggaggtgaaagcctgcatggccgtctgccagttgattgaggcgaatggcacatgcgtgtggccttggtagacgaacggcgcgtgaatctcatcggagaatatacgcacgtcgtacttggcggccagatcggacaatcgcagcatttcctcgcgcgtcaataccttgccgatcgggttgtgcgggttgcacagcacgaaggcatggcagccgttcgcgaacgcctgctcaatggcgtcgaaatcgaacagccattcatcattgcgcccgctgctctcgccggcgccctcgcacagcatcggaatctcaagaacctccacgccatacaggcgcggcacgctcaggaacggcatataggccggagtcggcaccacgatggagttgccggcgcgcacaatctcgcgcaggaacacttcgaacgcctccagcacgtccggcaccggacggatgcacgtcggatccacatcccagccgtatcgacgctgccatgcggcgcacgagcgggcgacctcctttttccacgggtcgggaatgtagccgagcgcgccacgttcggtggcctcttcgatggcttcggccacgcacggcgccagaccgtaatccatctcggcgatgaatgcgccgatgcagccggggtagcgggtccatttgtccgaaccgacctgctccagatcctcgatggtcgtcacgtcgatgtgattggcatcaaagcaagaggcaccggcggttgcgctgctcaaagtcgttgactgggaaacgttgttcatgctcataacatgtcattgttcccggtgcagaagggctgctcaacggtctggctccccgaaatcgtgatggcgctcgcaagcttgcttatcgctgtgcgactacttggcactcaaatatttgagtgccgtgcgctcgagctcctcgagcaatgaaccaagcgcggggcgatggtcgccggcacgagtcacgatgccgacctcgcgcgccgcaaaatcgtcggcaatgggacaggccaccagatcgccctgcaagttgatatgcgtatcgagcgccggcaccagcgagacgcccataccaacctcgaccaggttctgcgtggcccagtaatcatccgtgcagtggcggatatccggcttgaatccggcacgggtggccagtttcaccaaatttgcgcggcaggtggggcagccggcgatccaatgctcgtctttggcggcggacagcggcacaggttcgccggtctcctcgaatcgtttggcgatgctgctggagcggcgcaccagcagtcgcatcgggtcgtaacccagcgaatggaaggtcaggtcgtcgccgatgtgcaggaagttcgggatgctgctgtagcggaacacggcggcggcatcggccttgccttgggaaatcaggccgatcgcctccggcggctccatctgaatcaggctcagctcgatgtccgtgaacatactgagcttgaccacggtacgggccgcgatagtagagcagattgacggtggggccaccaaatgcaggtgagcaaaccgatgatgccgataatcctcgacctcacgggccgcccgctccagccgatcggcgatggcctcgccgtggcgggcgagcatcgaaccggtggcggtgagttccacaccatgcgaggtgcgttgcaccagagtcgaaccgcactgtgcctccagctttttgatctgctggctgatggccggctgcgaccaacccgtggccttggccgtggcggagaacgaaccatactgttcgatctgccacaacgtgaccaatgattgggggttgagcgtggccataggtacctctttcgtgccttttcgtgcagtgattcaattatggccgggcggcgggatgtggcgtgcgcgccgatcgtcagtcctcgaactgcttggcgagcggaaccatcagcacggtgagcacggcgaacagggcggtggtgatgaacagcacgatggcgaccggcatttggtcgtaggcccagccgtacaccatctggccgagcggctgggcacacatgctcacggccgcggccatggacatcactttgccggtcatcgcctcgggtgtgctgagctggatggcgggcacggcgatgagattcgtgaagcaactggcaaccattgtgccgcaggcgaagacgatcagcaccacgagtttggtccatgcgtcgaccggcagcaggaacacaatgccctgtgggaccatggccagcgtaagcgtcgccatcagccccggcatccagtgcatcgtgagtctggcggcgaacaggccggcgatgaatgcgcccgccacgccggaaacaccgatcaggccgtcggcgatgccgtagacagtggcgtcgaagccgagcactgtacgaatcgtgtacgggaagccgacgccggaatagccgataagcacaaagttgagtgccgccgcgaacaacagcagtctgaatacattcggccggtccttgatgaggaatcgcacgcctgccttgaggtcttcaagtggggtgggcagctcctcgtcgccgcgatccggggcaccgaggcggatgaagcattcgagcgcggctgcgccggcgaagcttgcgatggcgatgatcatcatgagacggatgccgaacatcgcatacagcacgccgccgaggaagctcggcagcagactgcttagttgttggacctgattgatcacggccatgccttggcgcatggtggccgggccgtactgccggaacatctgggggagtgcggcctgcacggtcggggtttcgaaggcgccgagcacggcgagcagcacctgcatggtggcgatggctacgatatggaagcccgtggtggcgaagacgatggcgctcgccagcacgagcacggcggagatggcgtcgagcgccaccatgatggtgcggcggttgacgcgatcggccagcacgcctccgaacggggagagcaggatggtcggcacgatggagatggccagcaccgaggcgaagatggtggctgagccggtttcgtccagcacccacatcgacatcgcgaatcgcagcatcacattgccgaacagcgagatgccttgtccggcgaccagcagcacgaagtcgcgggacagcagcgggcgttgggtggcggtgccggcgatgtcattctcgggtttcactgtgctattcattctgagcctttctccggctcccctgcgaacgtcatcatgcccttcgcggcgaccgtgatgagctcgtcatcgaaaatcggcacgccgatcgcgtcgagcatggtggccaagcagcggatgcgatgctccatttcgggcagggtcgccgggtagaaatacggcatcagccaataattcggcagcaacgaaagcagctcggcggcctcgcgcggatactcggtggggatggagccatccttgacgcccgcctcgatcagcggcaggaagcgttcgggcagatgcttgctccatacctgcatattcgcggcgaacgaaaccggatcgctcagcatcggcatggcggctcgcatgatctgcacgtggtcttgctcggtcatcgaatgccgccatagcacgcggaacttttcgagggcggtaaggtcagtgcgattcatgacggattcgttgaagtcgtcctgcacattgttgtctcggttggtgagctcttcgaggatggcttccttggatttgaagtggtggtagatcgcgcctttggagaggtcgccgagctcgtccacgatgttctggatggaggtgtgctcatagcccttggtcatgaacagccgttgtgcggcgtcgaggacgcgggtgcgcgtcacctcggggtgagcgttacgtgccatggtggcctccctactgtgcttgatgttgcagatcactatagataccgaccgacggtatgtatagcggtttcggcgagcctccaacgattccggagattgtcgcctaccctttttcgcttggtatctttcggctgtgtgcttgcccccgccagcaggggcagcatataggcataccagggtacaagtgtcgccgttctcagtatccttagaagaatgagccctgaagccttaagtgaactgatttccagcattgcccacaacctcgtcgccgccggccaggccggcgcgttgaccgacgagctgattccgcccgtcgacaagctcgccgtgatgcgcccgaaggaccgcgcgcatggcgactgggcctccaacatcgccatgcagctggccaagaaggccggcatgaagccgcgcgatctggccgagccgttcgccgccgcgctcgccgaagccgacggcatcgccaaggtcgaggtggcaggccccggcttcatcaacatcacgctcgactccgcctcggccgccgccgtggtggacaccgtactcgccgccggtgccatgaccgacaccgacaagcatctcaacaaggtcaacgaatacggccgcaacgcccatctgggcggccagaccctgaatctcgagttcgtctccgccaaccccaccggtccgattcacatcggcggcactcgttgggctgccgtcggcgacgccatggcccgcgtgctcgaggccaacggtgccaaggtggtgcgcgaatattatttcaacgaccacggcgagcagatcaaccgcttcgccaagtcgctggtcgccgcttgggctgaggccaacaacctcggcgaggccggttaccagaccgaaaccccgtgcgacggctacaagggtgcctacatcaacgagatcgccgcccgtgttcaggccgaagccgagtccgacggcgtggacctgaccgcactggcccaccaagatcaaggcctcaacgacgacggtgaaccgctcggcgaggccgacaccgaagtgcgcgaggaattccgcaagcgcgctgtgccgatgatgttcgatgagattcagaagtccatgaaggacttccgcgtgaacttcgacgtctggttccatgagaacagcctgtacgccgacggcaaggtcgacgccgccatcgaagagctcaagtcccgcggcgacatcttcgacaaggacggcgccacttggtttgaatccaccaagcacggcgacgacaaggaccgtgtgatcatcaagtccaatggtgagttcgcctacttcgccgccgacatcgcctactactgggacaagcgccatcgcgccgaaaacccggctgacgtggccatctacatgcttggcgccgaccaccacggctacatcggccgcatgatggccatgtgcgcggccttcggcgacgagcccggcaagaacatgcagattctcatcggccagctggtcaacgtgatgaaggacggcaagcccgtgcgcatgtccaagcgcgccggcaacgtcgtgaccatcgacgatctggtctccgtggtcggcgtggacgccgcccgctactcgctggcccgctccgactacaaccagaacttcgacatcgacctggccctgctcgcctcgcacaccaacgacaacccggtgtactacgtgcagtacgcgcacgcccgctccaagaacgtggaccgcaacgcagccgccgccggcatcagctacgagggtgccaacctggccctgctcgacaccgaggccgacggcgaggtacttgccgccctcgcccagttcccgagcgtgctcgccactgcggccgacgaccgccagccgcacaaggtggcccgttatctcgaagagctggccgccacctatcacaagtggtacaacgtggagcgcgtggtgccgatggccctgaccgatccggaaacccgtggcgacgatgaggctcgcaaggccttggagatcgccaagaatccggagccggcccgtgccgccgcccgcctgaagctcaatgacgccgtccagcaggtcatcgccaacggcctcgacctcctcggcgtcaccgcccccgaaaagatgtgattatgcccatttctccaatttggccggccgctacggctgtgaatgccgacggtgccattacattccacggtcgtaccgccgaatcgctgcttgacgagttcggctcgccgctctatctcatcgacactgatgaagtagtcgcacgtgccaggcacttcgtgcgcgctgccgccgaagcattcaacacatccactacgcacgtgagctttgccggtaaggcgttcctgtccaaagaaatcgtgcgattggtcaccgaggccggcatgttcgtggacacctgcacgatgggcgagatgaaaatcgccctcgccgctggcgttcccggacgtcgtctggtgctgcacggcaacaacaagtccgatgaggaaatcgcgctggccatcgaacagggcttcgccaaaatcgtgatcgacgagcccgacgagccggagcgcgttgctgccatcgcccgcaagctcggcaaacgcgcccgtgtgatgctgcgcgtcaccgtcggtgtccacgccggcggccacgagtacatctccactgctcacgaggaccagaagttcggcgtgccgctgctggccgccggggccgacgccgccgtgctcgacgtgctgaacgacctcaaagacgtgacgcctgccgctaccaacgcgcgtatctctgcgacgcattccccggaaaatggcgcggaaaagaccgagaaatcagagcgcgagctgcactacgacgtcaagtacccgtacgacctgagccacgaggaagtctccgacacagacaaggcgctggccgccgcgatggaagccattgcggacggtccgtccatcgccgtgctcaagaccatcctcgccaaccaggacgtactcgaactggtcggagcccactcgcacatcggctccaacatccacgatgcggacgccttcattcacgcggccaagcgcatgatgctgctgcgcaagaccctgtgggccaccgacgcctacatcctgcccgaaatcgacctcggcggcggctactccgtggcctacaccgatggcgaagattcaatggacattgacgtggaactcactcgcttggcggatgcggtcaacagcaccaaccgtgcgctcggcatgcccgccccggccatcagcttcgagccgggccgttacatcgtggcacccgccggcgtaaccctgtaccgcgtgggcaccatcaagcacgtgcacttgtccgatgccaaagacagtgccggcaacccgattgccgagcgcgtgtatgtgtccgtggatggcggcatgtccgacaacattcgcccgacactctacggtgccgactacaccgcgcgtctggcgaatcgcaccggttccgctgaaacgatgcttgcccgtgtgtgtggcatgcactgcgaatccggcgacattgtggttcacgaggtgcagttgcccgccgatttgaagcgcggtgacattctcgccgtgccggtcaccggagcatacggccgtaccatggccagcaactacaaccaggcgctgattccggcggtggttgctgtcagcgagtccggcgcgcacgtcatgctccgccgccagaccgtagacgacctactcaacctcgacgtcagcgagtaatcagcgtgcagaggtgagcgcctgacagtctgtaatgtgcggccaaaaccgtcataatacgaaaagggccgtcagcttgatgagtactttcggtctgctgtcggaaataatccgtaaaataggcgtgggatatagaaaactttttggaaggaccctgaattggctcacaacagcgaaaccccgattcgcgtaggcctgcttggtgccggcaccgtcggctcccagaccgcccgcctgattgtcgagcagaaggacgaactgtccgctcgtatcggccgcccgatcgaactgaccggcgtcgcctgcctcgacccgaaggaaaccgagaagttcccgtggatcgaccagtccatcgtcaccaccgatactttgagcgtggccaccaactcggacatcgtcatcgagctcatcggcggcaccaccgtggcccgcaagttcgtgcttgccgccatcgaatccggtgcttccgtggtcaccgccaacaaggcgctgctggccaagtacggcccggagatctactccgccgccgaggccaagggcgtcgacatctacttcgaggccgctgtaggtggtgcgattccgttcctgcgcccgctgcgcgagtccctggtcggcgacaaggtgaccagcatgctcggcatcgtcaacggcaccaccaactacattctcgacgagatgaccaccaagggtctccagttcgacgacgtgctcaaggacgcccaggccaagggctacgccgaagccgacccgaccggcgacatcgaaggctacgatgctgccaacaaggccgccatcatggccaccctcggcttccacacctccgtgaccatcgacgatgtgtccgttgagggcatcaccaagatcaccgccgacgacatcgccgcagccaccgccgaacacaaggtcatcaagctgctcgccgtggtcgagaacggcgaggccggcgtctccgcccgcgtctacccggccctgatcgacgagaaccacccgctggcctccgtgcacggctccttcaacgccgtgttcgtcaaggccgaggccgccgacgacctcatgttctacggccgtggcgccggcggcgctccgaccgcctccgccgtcgtgggcgacgtggtgaccgaagcccgccacattgctgctggctgcaccggcccgtccatcccgctgtacaagaatctgccgaaggctccgattaccgcctccaaggctgcattcgccgtgcgcttcctgatccacgacaagccgggcgtgctggccgccatcgccgccgagttcgccaagaacggtgtctccatcaacggtgtgaaccaggacctgaagcccaccatgaccgatcccggctacgacggcgagattcagcagttgcgcatcgtgacccacctgaccgacgaggaaaccctgcgcaacaccgtcaaggccgtgcaggcgctcgacttcgtcaccggtgacccgtccatcctgcgcgtgctggactgacaccgtctaggctccctctgatgaggcggtcgaacggctgcccgtgagttgaaagctgaatacccaagctcccctgacaaggggagctcctttttaaggaacaaccatgaacccaatctgcaatagcgttcacgtgcgcgtgcccgccacgtccgccaacctcggctccggcttcgataccgtgggtctggcgctcgactaccatgacgagctcactttcacgctcaacgacgacccgaacgacggcattgcccacgtgatcatccacggcgagggtgccgacaccctcccacgcgacgaaacccacctcgtggtctccaccttccgccgtgcctgtgccacgttcggcctcggccgactcggcttcacgctggaagcgaccaacaacatccctcaggctcgtggcatgggctcttccgccgaggccatcgtggccggcatcgccgccgccgcggccttcgcccagaccggtgacctcaaccgtccggccatcttcgatatggccgcccagattgaaggacacccggacaatgtggccccggctgtgttcggtggcctgaccgtctcttgggacttcgaaaccgcggaaggcgtcggctcggtcgccgttcctggtggtgaaccgctgcacggcggattccacgccgtcaactacccggtggacccgtccatcaccgccgccgtgttcgtgcccgactatgagctgtccactgagaaggcccgtcaggcgctgcctagggaactgccatacaaggacgccgtctacaacgtgtctcgcgtgggtctgctgcccgctgcgatgaatcccgtggtgctggcccaggccgcccagcagggcaggtccggcgtcgccgctgccccggctcatgataccgatacgtgcgcttgcgctggcggaacccgtgaatcgccgttcgctgacgagcttgcggccgctcaggcccagtccaacgcgctactgttcaccgccacgcaggacaagttgcaccagccgtatcgcggtaccctgatgccgccgtccaccgagctcattgcgctcttccgctccaagggctatgccgccgccgtctccggtgccggcccctgcgtgctcgtgctgcactacggcaacgcccgcgaagccatcgaccagatcgcatcggagcagcttgcttccggccactggcgtgtgcttcacctgcccatcaacaccgccggcgtcgaaatcgagcgtcgctaagtcgaggagaaggctcccgctggcgggagctggccgccgcaggcggtctgagagtggtccgccataccggcagagaccaccctcagtctcacttcgttcgacagctcccgccagcgggagcataaggacttaagtcatgtccattccgctaattcttgcttccaagtccaagcctcgccgtgacgtgctgtattcggcgggtatctgccccacaattcgcgtctcgcacgtggatgagcctgctgcgctggaagcggccgcccgtgaggaaggtgtcaccgtcgacgatttgagcatcaagcagcgcgtgatgattctggccgtggccaaggccgaggccgttcaccgtgcgtatcgtgatgtggccgatactgccgccgccgcaaccggcgatcgcgtgatcgcctacccgctcaaggccaaggaaatcaaggattcggaacgcgaagccgtcgtcgaagacctgcgcaaagccgccgccggcaagcccatcgactattccaaggcggaaatcgccaccacgcgcgacttctccggcatcgatatgccgaccatcaccgaacccatcgccaccgctattgccggacagccgggactgaccgaggcgacggtcggcccgctgattctcggctgtgattcgatgttcctcctggacggcgaatgctacggcaagccgcacagcgaagccgtggcccgcgaacgactgaagcgcatgagcggcgcgaccggcgaactgtggaccggccactgcctgatcgatttcgcgaccggacgtaccgtgcgcggcgcaagccacgccaaagtccatttcggcgaattcaccgatgacgacatcgaacggtacattgccaccggcgagccgctggaagtcgccggatcgttcacgctggaaggcttcggcggcgcgttcatcgacagcatcgagggcgatccgcacggtatcatcggcctcagcctgccgctggcccggcatctggccggcgaactgggcatcacgtggaccgacctgtggaatgtcggccgtggcgaactggagccggaaagcaaggcctcgggcaaccagcacgctggcattctgccgccggtcgaaaacgtgcatcagcccggcgatggctgggtggactgcgcctgcggccgcaagcattggggcaccaacggtgcgtccggcattctgctggctcgccgcgacccggcgagcggcaaggtgactcacgtgatcatgcagcaccgtgccgcgtggagcgccgaaggtggcacgtggggtatccccggcggtgccactgcggacggcgaatcgtccatcgaaggcgcgctgcgcgaaagctacgaggaagccaacatcacccccgaagacatcgaggtggtcggctcctaccgcgaggaccatggcccgtgggcctacaccaccgtgtttgcctttgaaaagcccggccacaccgtcgagcccaaggcaaacgacgacgaaagcatggaaatctgctgggtcccgattgacgacgtgcccaaccgcaagctcctcaccgctatgaagaccgactggccccgcttcgccgcccgcctggacgagctggcctgtgctggacatcggtagtggtgttggctgggccaatgttttgccgatgagttcacttgggtaatgccgtgtgaaccgcgtgtggaccgggacggattctgctgtcccggttcgtcatttcgtctctttttgggcaaccgggacagatttcgctgtcccggttcgtcattttgcctcttttgggacaaccgggacagaatctcattcacctgacgccctatcgtgcgatggtcgccgtcggggaatggcggaattccggggttttggatttgcatatatcgggtgttcatggaagggcctgtcccggttcgccaaaagaggccgaaatcccgaaccgggacagccgaatctgtcccggttcgtatgtcgatcgattgaccccgccaccgggacatcaactgcgcatagacaggacgcttcaatgtctggcgggcatgaccatatcggatgacacacgttccctcgtgcgtttcgccacgacctccgccccaagtcagtgcgaaaatggcatttttagcggtgtggtcagctgtcgcatgcggaaaatcctaaatcaaccgccgaagagacacatcgccgactcggcggaactcgctggtctgcgcgcaatgaggagtgttgtgtctgaatgcgattcagacaatggtcggcgtcaaatagcggtctccagccattaatcattggtgattgtggacattgagcggagtaaacattctagatgattcagggatatgccgaaaatcatatcgttcagagaatgaaataccgcatctcggagtaactgactgtcgacgtgcatggtttgaaatctgatatccacgcccatcatgcctagcaaaattacgggaatggggttcggactatttcgcctcagccaaccgggagcttccgaatgctcaatgctgtatgcacttagtgtgtggaaaccagccaatcattgaccaatggcaggccgcagtcgaaaccagaaatatcctcgctcgcagtcaggtgccgaggctcagtgaagttggtcacgtccatatgggatcacgctccaacaattcattcaggcgtaggcccataggttcgtttaatgctgcggtgaaatcattccacgctttactgttgagccgaatgatatgagcttcatggatgtcccgatctgcggcggcgagcagattcgataatgcccattgcaacgaagtcatgcctttggactcggccgcttggtcgattctggaacgttgctcttaggtgagtctcatttcaaaacgactgttcttgttattctctgtagtcgtactcctgttgtacgacttttgtacggacacgattggtgtgtgcgggatgtcgattgcgatggccatgtgggctcctttgcttggtctgttgtggttccagcttccgaaccggtcttccactgttcctcgtcttctcgagcaatgaacatctgatatatggattgtcgcgtcgactgcgtatctctaatccttgcggatgaggagcgggccggtgatccagaaaggttcataccgcagcccgatggtcggctgggcgttcgctccgtacgctcgggagtatgaacacagcagcatcgcaattgcagcagcctcagccggcgtcgggaccggcggctcagcctcagcagtctcagcaaccccaacagttccagcagccggcatcgcacacccagcagtgggccccggtcatcgaggcgcacgacctggtcatggactacaccgccagcatggcccgcgcacaggcagggcacggcgtcaccggcgtgatgccagccggcacgggagccggttatgcgtcggcgaatcccgctgcggccggaccgggtgccattcaggccggccagccatcccagccagcccagcccggcttcgccatgccgaccatgcacacgctcgccctgaaccacgtgaacttcacgctccgggagggtgagacagtagccgtgatgggcccgtccggctccggcaaatccactttgcttcacgcgttggccggcattatcaagccgactgccggcacggtcgtcttccgtggcactgacctgagccatatgagcgacgccgaccgcaccaaactgcgtcgtaatgtcttcggattcgtcttccaatccggccaactgctgcccgaacttccggccgtcgaaaacatcgccctgccgatgatgctcgacggcatgccctaccgcaccgccaccgacacggcgatcctgtggctggaacgcatgggattgcgcgcgctcgccacgcaccggccgggggagatgagcggcggacagatgcagcgcatcgccatcgcccgtgcgctcgccgtcagacctgccgtggtcttcgccgacgagccgaccggcgcgctcgaccaagccaccggccgcgaggtcatgggcattctcatggccgccgcgcgggacaacggttccgctgtggtcgtcgttactcatgatcccaacgttgcttcgttctgctcgcgcaccgtgaccatgcaggacggccagctgggaggcgtacgatgagcgctttcgcattgtggcgattgttccatcgccccggctcgcgtggcagtgcgggtcatacttcggtgttggccatcattgcttttgccgcagccaccactatctttctcaccgttttgggcggcgtgcatgggttcatgtggcgcgcctccgccgaccacaccattggatgcgcaatcaatctcgacgcttgcaaacccggaacagcggaaatctggaagcagcgtatcgccaatccccacagcctggatcaatacgccacggcatacgtcgtgctggcgttctttgcctgcctgctgctgattgtgccgttcgtggcgcttgccggttccgccgcgcgattggctgcgtcccgtcgtgacgctcggctcgcatccctgcgcttggcaggcgcgaccacggggcaagttattcgccttacggcgcttgatgcggctgggcaggccttggtgggggcgctgattggcatcgcggggtactgcgtgttgatccccctaatcatgttgctgcatttccagaatcagacgtttacgttcgagcaactgtgggtggggccgattgccttgatcattacgcttgttggcgtgaccgtgttggcgctgatctcttcgctggtcacgcttcggcgcgtggccatcacgccactcggcgtcacttcacgcgttgtgactacgctgccgtccggctggcgtgtggtggtgttcgccgtcatcatggtgattgccgttcttctgttcaagaatccgatggtgctggctcaggccggtgaagtagtgatgtacggcgtgatcatcggtttcatgctgctgtgcttcgcgctggtgaacctcgtgggctcctgggtggtcaccgctcgcgccaaggccaaggccaagcgccccaaggatgcggccacgatgattgccatgcgccgtattctcgacaatccgaagcgcgcctggcgcaatgtgtccggcattgcactggccgtgttcatcgccggcatcacctcgatctgcggattctttggctcggccgccgtggtcggtgacgccaacgacccgtccaccgtgttcattcgcgacatcggcaccggcggcatcctgacgctagtgttcgccgctgtgcttgccgcggtcagctccggtgtgatgcaggccggcagcgtgtacgatcaggccggcgaatatcgcatgctggtgttggagggcactgatgtcaagaccttgaaccgtgcgcgattcatcgaggtactcaccccgctcaacatcgtggtgatcgtggccggcggctgttccatgctgcttatggcccctctgttcgccgcttcgatgaccgaaccggccacgctggccagcttcttcggcgggcttgtgctgtgctatgcgctggtttcggtgggtgcgttcgcgtccaatcgggtggccgccagcttgaatctggccgattatcgggccgatgactgaggcggtacggtactttcccgggtgacgacactggtggggaggatgacgtgcatatcaccctgattgcccttgcggctgtcgatgatcatctgcacggcgcgttgggctatttcgctgaacggctgatgcacgctggtcagggagggcatgagttggccggcggggaaaatgtcgtcgaaccccatgacggacaattgctttggcaacgcgatcttatgctctcgtgcggcacgatacgtgcttactgcagataagtcgttgcagcaaaaaatcgcggtgggtcggtcggtgagttccagcagccggcaggctgcttcatagcttgtttcggcggggaagtagtcgccctgttcgatataggactccggcagatccaccccggcctgttgcagagcggcggtgaatccgctatagcgcgcgatgctggtctgtaggttcgccggcccccggataacggcgatgcgtcgatggccgagcgacagcaggtgtttgccggcctggtatcctgcggtccagttatcgatggacacgctcatcacatccgaatcgacggtatcgattgggtcgatgatgaccacgggaatactgcgcgatttcaacaaagacttcgcttgagtggtcagaccgcccatctgctgcataatcacaccttggggatttctatcgatgatgccgcggaaacagtcttccgtggcatcgccatggttggtctgggtgaccgtgatggcgaggcccgcctgctgcgcccagtatgaggcgtatttgatgagttccatcgtgccgttgtgctcaatgtattcgacgacgagctctatggtgggggagagtttggtgttgaccagaggccttgagtaaccgtgatctttgaggatttgctcgacttgtctccgcgtctcgtcggaaatgcctgacctgccattgatgactttggaaacagtggatgcggatacgccggcgatttttgcgagctcgccgaccttgagcttgtgggtggatgtatcgttaaccatcggtgcttccctcttggatattcgccgttcaattactgagacgatttcgtcgttgttcccaccattatgacgcattgtgccgtaacaattccgtgttttcttgccctttgtccggccttgaataaaaattttcgcaaataggcttgcaaatttctttattcggacgtacgatatagccgttggttcacaccaggcgaaggagcccgaacacatgagtaccatcaccaaagtcaagacgtatgacttccgattccccacttcaacgacgctttccggctcggatgcaatgaaccccgatccggattattcctctgcgtacgtggagatttccaccagcgccgacgacggcatcacgggtgtgggattcgtgttcaccatcggccgtggcaacgacgtggtttgcaaggccatcgaatcgatgtcgcaggtgctgattgggcgcaacaccgaggaactgctcgacaacatgcgcattgcatgggacctgttcgtgcatgattcccagctgcgttggcttggccctgaaaagggcgtggagcatatggccatcggcgcggtgctctccgcgttgtgggatatcaaggccaagcgtgcgggcaagccgttgtggctgctgctgggcgagatggagccggaggagctggtctccacgctcgatttccgctacatgaccgacgccctgcgccctgaggaagccgttgcgattctcaaagagggtcagaagggcaaggccgagcgtatcaagcatctgctgaaggtcggttaccccggctattcaaccgctcccggttggctcggctactccgacgagaagatggtcgcgctcgccaaggaggagacgcaggtcaagggattcaagcagatcaagctcaaggtcggccagaacatcgacgacgatctgcgtcgcctggccaaggcccgcgaagccatcggccccgacgtgcgtcttgccgtggacgccaaccaggtgtgggatgttcccaccgccatcgactggatcaacaagttccacgacttcgatctggcttgggtggaggagccgaccagccccgacgacgtgatcggccacgccacgattgcgcgcgccatcaatcccatcaaggtggccaccggcgagcagatgcagagccgcatcctgtacaagcagtatctgcaggcgaacgccttcggcatcatgcagatcgacgccacccgcgtggccggtccgcaggagatcgtgctcgaatacctgctggcaaagaagttcaacaagcccgtctgcccgcacgccggcggcgtgggcctgtgcgaggccgtatgccacttcgcgatgttcgattacgtggccgtgtccggcacgatggacggccgcatgatcgaatacgtcgataaccagcacgaacatttcgtccacccgactgagatcaaggacggcaactacgtcgctccgaccgctccgggcaacggtaccgaaatgacgctggagacggccgagaagtacctgtatcgcggctgaccgcaactggaaattcataactgaacaacacaacttaacacaacaacacacaaccactccggctggggtgccgaagccccggccgggcgtgacatggaacacccatgaaacgcagaataaggatggacgaaggagttcccatggatctgcatctcgaaggcaaagtcatcatcatcaccggcggtttcaaaggcatcggcaaaggcatcacgctgcaactggcccaggagggggccatcccggtggtgattaatcgacccgacagcgctctcgacgagttcaagaaggatatcgagcagtacaccaccacctatgatgtgcacttgcttgacctcaacgacaccgacaagatcgccggcgtcgtcgaagcaacatacaagaagtacggccatatcgatggcattgtgaataacgccggaaagaacgacaacaaggatctcgagaccactacttggcgtgagttcgaggaatcgcttcacggcaacctgactcactattacgagctggtccacgcggccgtgccgtatctcaaggaaagccgcggatccatcgtgaacatctcgtccaagaccgcgcttaccggccaaggcaagaccagcgcctatgcggccgccaagggcgcgatcctgggcctgacccgtgaatgggccgccgcattggtgcacgatagcgtgcgtgtcaacgccatagtcgtctccgagtgctggaccccgctctatgccgattggatcaagacctttggcgatgaagcggcccagcaggcgcgcctgtcggtgatcaccgacaagattccgctggaacatcgtatgaccaccaccgaagagatcggtaatgaagcggcattcctgctctccgaccgctccagccacaccaccggtcagtgggtgtacgtcgatggcggctatgtccaccttgaccgtgcgctgagctgacaagcagccctttcccgaatattcgcgcggcaattccggagctttgatcattgctccatccgtacgccgtatccgcgtatgccgcccgtatcacccgcgccctgggtcatccgtttaccaacatggcccagggtggtccactcctcgctaggcaatatcggggaaactcgtatcactaaggagtcaatgatgacatccaaaaacacaaccggttccaaggcgaccatcgccattgtactggtgacctcactgttctttatctggggcctgaccatgaacctcgtgaacgcgttgaactcgccgttcgcaaactacatagaactcagcagcgccgaagcgtcattactgcaggtggcctattacggcgcatacttcgtcatggccattccagccggcttgatcgccaagcgtttcggttataagggcggcgtcatctccggtctgttcctgttcgctctgggcgcgttcatggtgatccctgccaccagcatggccagctacggcctgttcctgttcgccatgttcgttatcgcgctcggcgcggcatcgctggagaccaactgcaatccgtatatcaccaagctgggtgatgaaaagggcgaatcgttccgtatcaacatggcgcagagtttcaacggcgtcggcaacatcgttggcccgctgattcttggccagattctcggcaccaccgtcgcatcaggcgagtccggcttcgacgccgctaaggcgcagttcctgaatgatacccgcacgatatacattgtgatcggcgttgtgctggtcgtggtgctcgccgtgttcgcgctgttcaagctgcccacgcctccgggagacgaagaggaggccgcgggcggcgcctcctccgagaacagctccttcttcggcctgctcaagcgcccgcacttcgcattgggcgtgcttgccgagttcattttcatcggcctgcaagtggccggcatggcggtcttctccgcctacgcgctcaagcactggggcgcgggcatcacagccggcaccgcggcgatgatgctttccgtgctttccctgctgttcaccatcggacgcttcgccaccaccccattgatggccaaattcgatccctcgaagattcttggcgtatacatgaccatttcagccgtgctgatgttcgtggtattccttggcctgggcaaggtctccgtcatcgcgttcatggtggcgtatctgttcatttccatcggatacccgaccatattctccctgacgctgaaaggtatcaagggttccgcggcgaagaccggttcctcggctttggtgatgagcattgtgggcgccgcgttgattccgctgctgctcggtgtgattcaggatgcggcaggcatcgagatcgccatcctggtgatggtcccgggcttcctgttcgtggcatggtacgcattctggggttccaagatcggtctgaaggaggcctgacatgacactcaacgtaatcgattcccacttccatatctgggatccggatgcgcaggatctgccatggctggcaggattgccctcgctgcaacacaagtacacgattgaagacctagccgcacagtacgccaagtttggcgtgaacttcctcggcggcgtatatgtggaggtcgacgcggccgatcacgagctcgaggaccagttgttgtacgagaatgccagccctctgatcctgaagcgcatgttacaaggacgggtaagcccttggatgcgtgtcccgatcaacgccgatggcatcagggaaccgctgcatgtggattccgagccgcggggccgtgcgctcgaacccgaattcatcgccggtctacgcgcgatggccgccaagggattgccattcgagctgtgcaaccgtggcccggaactgggcgacatggccaaggcgttcgcgcaggttcccgaagtgacggtcatcatcgatcatctcggcaacgtgcccgggcttgatgaggaatcgtgcgccgcgctcgcagcgttggccgaactgccgaattcgtatatcaaggtttccggcgacaacccggtggacccggacatcgtgaaatacgtgcgggacacattcggcccgaagaaggtgctgtacagctccaactggccggtcgtggaactcaactcgacctttgccacgcacttccaactcatgctggacacgttcggcgaggacgaggacttcttcgaaaacaacgcccgccgcgcttacaacatcgactaaacccaagccccctctgatgagggggctatcgtccgcaggacgactgggggagaggccgcaaacccggtgccgcttgtgcggcacccctattccgtaacgaaaggaacaatcatgacaagcagcgccgaattctcaggcatcatctgcccatccatcaccatcaccaaggacgacggtgacatcgactatgaacgttgggggcagcatctcgatcatctgatcgaggccggtatcaacggcgtgctggtgtttggcagcatcggcgagttctatgccttccctctggacgtcaagaagcaggcggtcgacttcgtggccaagcatgtcgccgggcgcatcaaggtgttcgcgggcgtgggcgataccaacttgaacaatgtgatcgacttcgcgcgggcagtcgaagcaagtggagtggatgcgctcgtggtcgtttcgccgtattacttcggccctactgcgggaggcgcgaaggcgtacttcggcgcggtcgctgaagcgacgaatcttccggtgatcctctataatttcccaccgcgcaccggcagcgacttgaccccggagctcgtggccgagcttgccgccgcgcacccgaacatcgtcggcatcaaggacacggtcgacacaatcagccacacccgcaaggtgattcgcgcggtcaaggccgtgaatccacggtttgcggtgttctccggtttcgacgagtactatctcgtcaaccgcgtctccggcggtgatggcgtgatctgcggcatgaccaatgtggagccggagaccttcgttacgctgcaccgtgcatatgaggccggcgactatggcaccgcaattgaggccgccgaacgcatcagccacctgatggcgctgtacgatcagaccgacctgttcatctccgccatcaagggtgcggtcaaggccaagggactgaacatttccaccctgatccgtgagccagcggtgcaactcactgctcagcagtatgaggcgattaaggcgattctcaagtagtgtatatctcaggcttccgcggaatcctacggtggatttcgcggaagttttttttacggtgattacagttgccggctcagctcagcagcgccgcgatgatcgcgataaacaccgggctggtcatggtgctcatcagaatgccgtcgcgcgcgaaggtgaggcccacgttgtagcgggccgcgtagttgtacacgttctggccggtgggcagagcggcgagtaccacgcaggcgtacagctcggagccgcggaagcccatcacgaaataggcgagcaggaacgcgatgattggcatgatgatgttcttgaggaccgcgaccgtgaagatggccgggcgatcgcccttctgctgcagcggcttggtgccgtgtagggacatgccgaacgccatcaggatcattggcaccgctgaatcgccgatcatgtcgatcgggtcgaaaatgaatttcggcactgggaaccagccgcttttagcggaaatcgcagagaccacaatgcccagcagcgaaccgataagcagcggttgatgcagtggctgcttggcgatttccttgatggagaccttgcccttggtggtcacgtccagcactgtcaggcccaccggtgtgaagatggcctgctgcatgaccagaatcggtgccaccagagccggattgcccagaatgtaggtggcgattggcaggccgatgttattggaattgaggtacagcgaattcagggcgccgatggtggcgtccggggcgttcaggtggaagaacatgcggttgagcaccaggaacaccacgcctaccagcacggcggagaagaacgccacgataatcgagggatggaagatgtcgaagatcggttccttggagaggatggcgaacatcaggcacgggctcgatacgaagaaggagaaccggttgagcaccatctgagcggacggcccgccgattcgcattcgtgcggcgacatatcccaccgcaatcacgatgccgataacgcagaagccttgcatggcgctgattagacctgacataatcctccctttcgccaccccagtgtggcacataaaaatgtattcggccgcaaaatctcatgtagtgggtgtgctgggcccgccgcccacgcggtacgctgttcacatgacgcttgaattgaaccgcaccgcatccactgccgagcagctgaacagcctgctcacccagatcatggagaacttctccgtgtccgaccacgagggccccctcaccgacgaggtcgaggccttccttaacgagcaagagcacctgaccgtccgccgtcatggcgacacagtggtggccagcaccgacttcggcgagccgaaccgtgtgatcttggccgggcacctcgatactgtgccggtcatcgacaatttcccaccgaagtggctggagcccggcgattcgctgattcgcgaagaaatcgcccacgctcatcccgaagaccgcgtgctgtggggccgcggtgccaccgatatgaaggcctccgacgcggtgatgctctacctcgccgccacgctcgacggccgcacgccggaaaccaccccgaaagtcgacctcacctacgtcttctacgaccatgaggaagtcgtcgccgaaaagaacggccttcgcaaagtcgtcgaggcccatcccgattggatcaccggcgatttcgccatcatcggcgagcccaccaacagcggcatcgagggcggttgcaatggtacgattcgcttcgacgtcgtgacccacggcgtggcagcgcactccgcccgcgcgtggatgggggagaacgccatccacaaggcggccgacatcctgagtcgactcaacgcttacgagccggccaccgtgaacgtggacgggctcgactatcgcgagggcctcaacgccacgctgatttccggcggcaaaggcacgaacgtcattccggatgaatgccgcgtacacgtcaactaccgcttcgccccggacaagtcgctggccgaggccaaggctctgatgatgggtgcggatgccggtgccgaactcggcaatggcgagcatgtggccactggcggcgtgttcgagggctacggcatcgaaatgaaggacgaaagcccctccgcgcgcccgggcctgaacgccccgctcgcccaagatctggtccgactggtcaaggagcgcaccggccgcgacccgttggccaagctcggctggaccgacgtggcacgcttctcccagctcggcatcccggccgtcaacctcggtgccggcgacccgctgctggcgcacaagcacgacgagcaggtgcccgaatccgacctggccgccatgaccgcaattcttaccgactggctggtctgacacctctcgagctcccctctctgaggggagctgtcaccgcagggaggggagccgagagaacgtcagcctcgccgggccacgcccgcacaaaatatgtggcatactaaaggatggtggttctgcataaccatcagcgtgcgagatggcgtcgatccccttgcggctctcgagaatgagacaacgcaagcgccggtgtccgccacccgcaggacagacttgagacgaagttgcctttacgcggcgcgttttcgcgcggccacggtgagagcgtggtgtgagtcaagcgtataggcctggaaataggcgtcgtgatgcagcgcgccgcgaggagcattgtgcccactgacaaccgtgaaggtttcgtcaacgacggaaccgataattcaaccgtatccaatgccgattcggctgcagccgtgaacgctgcgcctgccgccgcctcccagcccgtcgaacctgttcgccgtcgtcgtggcggccgccgcgtggtccgcggcaccggtgctgccggcgcctccctggaactgcaagtgcaggaacgcaccccgctgttcgaagcccccgcgcttcccaatgccagcaccgcggccgattccaagtcatccgattccggcgattccgatgaatccagcgattccaaggattccgccgaacgtccaacccgccgccgtgcgcgccgcgtttccacggccgacgatgccgccgaaacgccgcgtcgcacccgtcgtacgtccgccgcatcttccagcgataccgatgatgacgacgagactccgcgccgtccgcgccgcgccgcttccgcagtggtcgactcggatagcgaggatgatcgtcctcgtcgttcgcgccgcactgtcagtgccgatgatttcgatgacgatgacgccccacgttcccgccgccgttcggttgtggacgatgacgattacgacgaggaccgcccggttcgccgccgctctcgctcccgccagtccgacgatgatgactacgaggatcggccggttcgctcccgctctcgccgtgcgtctatggatatggatgatgatgacgaggaccgtccggttcgccgtcgttctcgccgtgcagttgcggatacgcacgaggacaccccggatgagcgcctgttcgacgcggtcgaatccctgccctctggccacgaggccgtgcgtcgcggcaagccgatgacgtccctgctcttccaggaaccggtactgcccgccgccgtggatgcgcacgataccgctgacactcgtgatgacgatgttgacgccgacgaacgcccgtctcgtcgctcccgccgctcgcgcagccacgacgatgacgatgcccagccgcgcagccgtcgccgcgacgatcgcggccgcgcctccgccgaccgtgacgcttcccgtgacgccgcgtccggcgataccaacgccgatcacgacgatttcgacgccgacgacacctcggactcccgccgttcccgtcgctcccgccgcctgaacgcccaggagcgccgtgcagccgccgaagtcgagcagattgaggaagacctcgagctggacgatatcgcctactcgccgattgccgaagaggagggcgacgaagaatccgacgccacccgcacccgttcgcgccgtcgccgccgtcgcggctcacgcggcgaaaccggtgccaacggcgagcacgataccgccgagaacgatgccgaagatacgcgttcccgccgtcgtgacgatcgcgatgatcatgaccgtgatcgcgatgaggacgatgaggagcagaccgtcactcgccgtcgccgccgccgtcgtggcggcaagaacggcgagggcaccgacgaccagagtcagaacagcgaacagccgctggtccgacgctcccgcaagcagcagtacatcgacgagatcactgatgtggaaggctccactcgtctcgaggccaagaagcagcgccgccgtgacaaccgccgtgagcgcagccgccagagccagctcatggaacaggacttcctcgcacgccgcgagaacgtggaccgcctgatggtggtgcgtgagaaggaacatcacacccagatttccgtggtggaagacaatgttctggtcgagcattacgtctccgacattcaggaagtacagaccgtcggcaacatctaccttggccgcgtgcagaacgtgctgcccagcatggaggccgcatttgtggacatcggccaggcccgcaacggcgtgctctacgccggcgaggtcaactgggatgccgctcgtctcgaaggccagccgcgccgcatcgagctggcgttcaagtccggcgacccggtgctcgtgcaggtcactaaggacccgatcggccacaagggtgcccgcctgacctctcaggtcacgctcgccggccgcttcctggtgctcgtgccatccggcggcatgaccggcgtgagccgcaagctttcggagcgcgaacgcagccgtctgaagaacatcgtctccaagatcgccccgaaagacatgggcgtgatcatccgtaccgcagccgagggcgcatccgaagacgccatcgtcaaggatctcgaatcactggtccgccagtgggagcgcatcaacgccaagcgcgaggaattctggcacggcaagcgcccgaagctcctgcagggcgagcccgacgtggccatccgcgtggtgcgcgacatcttcaacgacgacttcagcaagctcatcgtggaaggtgacaaggtctacgaccgtatcgaggaataccttgacaccatggcccccgacttgaaggacaagctggagaagtgggacccggccgagcatgaaggcaaggacgtgttcgacaagtggtccatcgactcccagctgcgtaagggcatggagcgtcaggtctacctgccgtccggcggctcgattgtcatcgatcgcaccgaagccatgaccaccattgacgtgaacaccggccgctttatcggcaagggcaagtccttggaagaaacggtgacgcgttgcaacctggaggcgtctgaagagatcgcccgccagctgcgcctgcgcgatatcggtggcatggtgatgatcgactatgtggatatggtcatgcccgccaaccgcgatctggtgctgcgccgcttggtcgaatgcttggcacgcgaccgcaccaagcatcaggtggccgaagtcacctcgctcggtttggtgcagatgacccgcaagcgcatcggccagggtctggtcgaggcgttctccgaggaatgcccgacctgcaagggccgtggtttcatcctgcatgatcagccgaccgtttcggccgactacgacgatccctacgcgcttcgcggtggcgacccgttcgtcaaaaccaacaagcacggtcgcggcaccgctcccgctcccgaaccggctggttccagcgccgacgtcaaagccaaactggctcagattgccgccgctgccgtcgctgccaacaacacggcggaagagtaacaggtgtgtcgtgcttgacacgcgggcaaaaatcatttgatttagtccgcatggtggtgtagattcgaaactcggtgtctgaccgcaagctcggtgcgtgttaggcaaggtagctttccaaaacataaaaggaacgataatgtacgcgattgtgaaggccggtggccatcaggaaaaggtcgaggttggcgacgtcatcctcgtgaaccgtctcgacgctaagaagggcgataccgtggaattcccggtctccctcgttgtcgatggtgacaaggtcacccttgccgccgccgatctggccaaggtgtccgtcaaggctgaggttgtgaacgacgaagccaagggcccgaagattagcatccagaagtacaagaacaagactggtgttgctcgccgtaagggtcatcgccagaagctgactatcgtcaagatcacggcgattgcctgagttatagaaaggaccatgaatcatggcacataagaagggtgcgtccagctctcgcaacggtcgcgattctaacccgcaatacctcggcgtgaagaagttcggcggcgaagccgtcgtggccggcaacatcatcgttcgccagcgtggcaccaacttccacccgggccacaacgtcggcatgggcaaggatcacacgctgttcgccctcaccgatggctccgtgaagttcggtgtgcgtcgcgaccgcaaggttgtcgacgtcatcgcctgagcgatatagcgtcaagcttttttcaagccgcgcccgtaaggacgcggcttttttgtaaggtaatcaatatgagtgattttgtggatcgagtaaccgtccatgtcaagggcggcgatgggggcaacggttcggccggcatccgtcgtgagaaatacaagccgttggccggcccgaacggtggcaatggcggcgacggtggttccgtggtgttcgtggccgaccgtaacgccaccagcctgctcgactatcgtttcatgccgcatcgtgtcgccggcagcggcaccatgggtttgggcgacaataaggacggctccaagggcgaggacctgattctgcccgtgccctgcggcaccgtcgtctttgaggcgcgcggcgaacagggcaaagccaagcatcccggcgcgcagctcgccgacctgcgccacgagggcgaccgctgcgtcgtcgcccaaggcggtgccggcggcctcggcaacatcgccctggctaacaagacccgccgcgcccccggcttcgccctgctcggcgaactcggtgaagagcgcgacgtgattttggaattgaagtccatcgccgacgtggcgttggtcggtttcccctcggccggaaagtcgtccctgattgcggcgatgagttccgccaagccgaagatcgccgactacccgttcaccacgctggtgccgaatctcggcgtcgttatcgccggcgactctcgatacaccatcgccgacgtgccgggcctgattccgggcgcctccgaaggcaagggcctgggactggagttcctgcgccacatcgaacgtaccgaaatcatcgcccatgtgatcgattgcgccacgcttgaaccggaccgcgacccgatgtccgactaccacgcgctggaaaacgagttggcgctctacgccgacaagctcgagctgccgttgggtgccatcccgattcccgaacgcccgcgcatcgtgattctgaacaagatcgatgtgcccgaggccaaggaattggctgagttcgtgcgtccggagttcgagaaactcgggctgaaggtctttgagatctccactgcctcgcacgagggtctaaaggagctcaacttcgcgttgtctgcgctggtgcacgagatgcgtgaggaagtgtccaaccgcgagcaggccgaagaggaggctcgcgtggtcatcaagccattggagaccaagggccgccgtccgcgtcgtgctgacgagggtggcagtgcgcttgagttcacggtcgagcgccgcgaactcggcaatggcgaagtgttcttcgaggtgcgtggcgtcaagccggagcgctgggtcatgcagaccaacttcgacaacgacgaggccgtgggctacctggctgaccgcttggccaagctgggcgtggaggacgagctgcgccgcaagggtgctcaccccggcgacgaagtgcgcatcggtcgtggtgcccgtatggtcgaattcgattgggatccgaccatctccgctggtgccgaaatgctcgacggctccaacctcggtgcccgaggcaaggatctgcgtctcgaagagctggacccgcgcacgcaccgccgctccaacgccgaacgtcgtgcccaataccacgagatgatggacgcccgtgccgccgtgcgcgacgcgatgatggccgaacgcaaggccggccactgggccgacccgaccgttgacgacgatcgccatgacgaaaccagcctgttcggccacggtgagtccagcgaagatggtgaaaccgaggaataaatgagcactccgagtcaggccgaggtgcggcgcatgatcgccgcagccggaaccattgtcgtgaaagtcggctccagctcgctgacccagccgagcggtcacctcgacccggacaagctcgacgcgttggccgcggccttggctcaggtccgattgatgggcggacgtgtggtgctggtctcgtccggtgctatcgccgccggtttcgggcctctgggctttgactcgcggccggtggacgtggccactcagcaggccaccgcagccgtcggccaagggctactgatggcccgctacgagactgcgttcggtcgattcggtattcgcgtcggccagattctgatcactgccgaagatacgattcgtgccacccagtaccgcaatgtggaacgcacgctggaccgtctgcttgacctcggcgtggtgccgatcatcaacgaaaacgattcgttggcctcgaacgagattcgcttcggcgacaacgatcgactctccgcgttggtggccaacctggtgcgggccgaagccttggtgctactgaccgacgtggacgcgctgtacactgcgccgccctcgcagcccggctcccgccgtgtggaatatgtgcccaacgtgattgatgcgctgggcgacatccaagtctccggctccggctccaaggtcggcaccggcggcatggtcaccaaactcgaggccgcgcgcgtggcggccgtctcgggcatccccacggtactcacctgcgcctcgaacgcgggccctgcgatgatgggcgatccggtgggcaccgtgttcgcaccggttaaggcccgcggctcctcacgccgtctgtggatcggcttcgccgccgacccgcgcggcacgattgtggtcgatgcgggtgccggccaggcgattcgcggcgggcgtgcctcgctgctggcggccggcgcgctcgaagtacatggcgatttttccgccggcgatccggtctggatcgatgccgaaagcggtgaacacctggcccgaggcctcgccggcttcgattccgaagaaattccgcagatgctcgggcgtaacaccgcccaactcaagcgtttcctcggcccccagtacgcccacccactggttcatcgcgacaatctcgtgctcgtgtgactgatggaatctgtcacacgacagattccatcaccatagtgcggctctggcgatttttcgtgctgtaggtttagcatgggagccatgactatggcgcaatggcagactctttccgaccgtatcaacactgtggcaccgagcgctacgctcgccgtcgattccaaggccaaggccatgaaggccgccggacttgacgttgtcggcttcggcgcaggtgaaccgaatttcccgacccccgcaaacgtggtcaaggctgcggcagatgcctgccttgacccgaagaattacaagtacacgcctacgccgggcctgcccgagctgcgcgaagcgattgcggctaagatgctgcgcgattccggctatgaggtcaatgccgatcaggtcgtggtgaccaacggcggcaagcaggccgtgtatgaatccttccagatcttgctcaacgatggcgatgaggtcatcattcccgctccgtactggaccagctaccccgaggctgtgaagcttgccggtggtgtgccggtcgaagtattcgccggtgccgacgtgaacttcgagccctcgcttgaggcgctggaagcggcccgtaccgagcatacgaaggcaatcatcgtcaactccccgaacaacccgaccggagccgtctggaagccggaaaccgtggaagcgatcggtcgttgggccgtcgagcaccacatttgggttatctccgacgagatctacgagcacctgaactatgacgatgcgcacaccacctacatcggtgccgccgtgccggaatgccgcgggcagttgctggtgctgaacggcgtggccaagacctatgcgatgccgggctggcgtgtcggctggatggtcgctccgcttgaggtggccaaggccgccgccaagctgcagggtcatatgacctccaatgtggccaacatctcccagcgtgctgctttggctgctgtggccggcccgctggatgaggtgcacgagatgcgtaaggccttcgacgcgcgccgccgtgcgattgtgaccgccttgaacgatatcgagggcgtcaactgcccgactccgaccggcgcgttctacgtttttgcggacatcaccgctttgcttggcaagccgctgggtcccaagggcacagtgtccgatacgtccgctgactttgccgctgcactgttggatgaggcccacgtggccgccgtccccggcgaggcctttggtgctcccggttacctgcgtttctcctacgcactggccgacgaagacctagccgaaggcatgcgtcgattcaaggaatgggctaactgagaagagtcgcgtgctacgcgcgcgacacgcgatttgcgataatccaccggagccgttactataacgacttggcggtttcgccgtggcgaagcgttctctacggaacgcacgccgaggtggattttcacctagggaagtggcgcaattggtagcgcaacggtctccaaaaccgtaggttgtgggttcgagtcccgccttccctgccaagtttctaataatcaagcagctgacgcgaggtacggaatggctaagacgagcaagagtgaaaaggcagtcaagccgaatgtcttcatgcgtatcggtctgttcatcaagcagatcatcgacgagcttcgcaaggtcgtgacccctaccgccaaggaactgttcttctggtctctggccgtattcatcttcgtgctgctgctgatggccctcgtgactggcatggacttcggtctaggcaaggccacgctgtgggtgttcggctgatccgcacaacctaaggtgaataacaacgcatgagtgatgaactgaatctcgagaacctcgacgccgtcccggctgaggagcctgttgtcgaggcttccgaagctgctgccgatgaggcagctgccccggtcgaaccggtcgctgacctttccgcagaatctgacgcatccgtcgacaatgcagatgttgagcccgacgctccggcggcgactgaatccgctcccgttgcttccactcagaccgagaccgtttctctggatgaggacgaggaagaagtcaacgaatccgagcaggccgaggagaccgatgccggtcagcaggccgttgacgaattctccaagtccctgcgttcccttgatggcaagtggtacgtgctgcacacctactccggctacgagaagcgcgtgaagaccaacatcgagtcccgcgtcgcctccttcggcatggaagaccagatcttccaggtcgaggtgccgatggaagaagtcgagaagcacaccgagaagggcaagaaggtcatcacccgcgtgcgtgttcctggctacgtgctgattcgtatgtggccggatgagaacgcccgccgtatcgttcgtgagaccgaaggcgtgaccggcttcgttggcccgaccaaggatccggcgccgctctcccgcaaggaagtcgtggcgatgatggctccgatgattgcttccgaggcactcaaggccgccggcgacaagcccgccgccgccaagaagcgcaaggtcgaagtctcctacgccgttggcgatcaggtcaccgtcaccgatgggcctttcgccaccatggccgccgttgtttccgacgtggagcccaccactcagaagctcaccgtgctcgtgtccatcttcggccgtgatacgccggtggagcttggcttccaccaggttcagaagctagattaactcccaaactttgcagagcccgaccatcgtggtcgggctttttgtgttgtccgggtggatttgcataataggaaagcttgtgtctggagaggagactcgctagcacagcacagcaatataagttgcgggaggagaccgaccacaggccgattgcctgcagcatgcacggataaataatgagtcaagaccgagcatgatggcagacagccgaacctgaggacggcgaccattcgaaccgcgttatagaaagaagaaccataatatggctcccaagaagaaagtctcggcgctgatcaagctccagatccaggctggcaaggccaacccggccccgccgctgggcccggctctgggttcgcatggcgtgaacatcatggacttctgcaaggcatacaatgcccagacgcaggacaagatgggtcaggtcatccctgtcgagatcaccgtttacgaagatcgttccttcaccttcgtgctcaagaccccgccggctgcagctctgctgaagaaggccgctggcgttgagaagggtaccgagaacccgctgacccacaaggtcggctctgtcaccaaggcgcaggttcgcgaaatcgccgagatcaagatggaagatctgtctgctcgcgatatcgaggccggcatgaagatcatcgagggcaccgctcgctcgatgggcatcacggttacggactgataaggagaaggacagatggtaaagcgttccaagaagtaccgcgaagccgctgagcgcgtcgatcgcaacaacctctacaccgccaacgaggccatcgctctgctcaagagcatgccctcctacaacttcgaccagaccgtcgaggctgtgttccgtctgagcgttgacccgcgtaaggccgaccagctcgtgcgtggtaccgtcaacctgcctcacggcactggtaagaccgccaaggtcctcgtgttcgcccgtggcccgaaggccaccgaggctaccgaggctggcgccgacatcgtcggtgatgacgacctgatcgcaaaggttcagggcggcttcctcgacttcgacgccgtggttgctactccggacatgatgggcaaggtcggccgtctgggccgtgtgctcggtccgcgtggcctgatgccgaaccccaagaccggcaccgtgaccatggatgtcaccaaggctgtcaaggacatcaagggcggcaagatcgagttccgtgtcgacaagaacggcaacctgagcttcctcatcggtaagatgagcttcgatgagtccgctctggacgagaacttcaaggctgtggccgacgaagtcaagcgtctgaagccgtccaccgtgaagggccgttacctgaccaaggcgaccatcacctccacgatgaacccgggcgttccggttgacccgaacaccctggcctgaggctagcgagcttcaatagctactgaaagggacttcccgtaaagggaagtccctttttgcatatgcgatgaccggttgcgagaaggtgaacctggatggtcacgcaatcgaattcttgcaacacgccggtgaacgcatgaatttgttacgcatcggcaatgcaaaacggattattctggtatcagaacagcgcaaataggctgtttgcgacacgccgagggaaccgtgtgattgcaacgattcctgaggcttttgcgcgcctcgatttgcgtgaatccggacatgcgtgtaagttattcacctgttgccgctcagcgcggcgggttccttcctctggttggtttcccgtctggctggtgtggtggtggtttgagaactcaagagcgtgtttgtactacttctttatagtcaatgattgccagttcattcctcgcctgattgcctgtcgtggtggttgggtacccgggagggtttgatgaggggtgaggttttttgagggcgtccttccttaaggacgtgctcgtcaatttttgttttgagagtcatctattcggatgcttttcatgaagtttttttgtggagggttcgattctggctcaggatgaacgctggcggcgtgcttaacacatgcaagtcgaacgggatccaccgggctttgcttggtggtgagagtggcgaacgggtgagtaatgcgtgaccgacctgccccatacaccggaatagctcctggaaacgggtggtaatgccggatgctccagttgatcgcatggtcttctgggaaagctttcgcggtatgggatggggtcgcgtcctatcagcttgacggcggggtaacggcccaccgtggcttcgacgggtagccggcctgagagggcgaccggccacattgggactgagatacggcccagactcctacgggaggcagcagtggggaatattgcacaatgggcgcaagcctgatgcagcgacgccgcgtgagggatggaggccttcgggttgtaaacctcttttatcggggagcaagcgagagtgagtttacccgttgaataagcaccggctaactacgtgccagcagccgcggtaatacgtagggtgcaagcgttatccggaattattgggcgtaaagggctcgtaggcggttcgtcgcgtccggtgtgaaagtccatcgcttaacggtggatccgcgccgggtacgggcgggcttgagtgcggtaggggagactggaattcccggtgtaacggtggaatgtgtagatatcgggaagaacaccaatggcgaaggcaggtctctgggccgttactgacgctgaggagcgaaagcgtggggagcgaacaggattagataccctggtagtccacgccgtaaacggtggatgctggatgtggggcccgttccacgggttccgtgtcggagctaacgcgttaagcatcccgcctggggagtacggccgcaaggctaaaactcaaagaaattgacgggggcccgcacaagcggcggagcatgcggattaattcgatgcaacgcgaagaaccttacctgggcttgacatgttcccgacggtcgtagagatacggcttcccttcggggcgggttcacaggtggtgcatggtcgtcgtcagctcgtgtcgtgagatgttgggttaagtcccgcaacgagcgcaaccctcgccccgtgttgccagcggattatgccgggaactcacgggggaccgccggggttaactcggaggaaggtggggatgacgtcagatcatcatgccccttacgtccagggcttcacgcatgctacaatggccggtacaacgggatgcgacgcggcgacgcggagcggatccctgaaaaccggtctcagttcggatcgcagtctgcaactcgactgcgtgaaggcggagtcgctagtaatcgcgaatcagcaacgtcgcggtgaatgcgttcccgggccttgtacacaccgcccgtcaagtcatgaaagtgggcagcacccgaagccggtggcctaaccccttgtgggatggagccgtctaaggtgaggctcgtgattgggactaagtcgtaacaaggtagccgtaccggaaggtgcggctggatcacctcctttctacggagaattcagtcggatgttcgtccgacggtgtgcgccccgcgcgtcgcatggtgcgatggcggcggggttgctggtgtggaagacgtcgttggctttgccctgccggtcgtgcggtgggtgccggggtggtatggatgcgcttttgggctcccggatcgccaccccaggctttttgcctggcgcgattcgatgcccgtcgtgcctgggggccggccgtgtgccggtgcgatggcgtggcggtgcgtggtggcttgagaactggatagtggacgcgagcaaaacaagagtttttgaatctttgttttgctgttgatttcgaatcgaactctattgttcgtttcgatcgttttgtgatcatttttagtgtgatgatttgtcgtctgggaatttgctagaggaatcttgcggccatgcactttcgtggtgtgtgttgcttgcaagggcgtatggtggatgccttggcagacaggaccgatgaaggacgtttgaggctgcgatatgcctcggggagccgccaacagggctttgatccgaggatttccgaatgggggaacccaccgaccgtcatgggtcggtaccggcttcggccggggggtacgcagggaagtgaaacatctcagtacctgcaggaaaggatattccgtgagtagtggcgagcgaaagcggatgatggccaaaccttgcgcgtgtgatacccgtcgggggttgcgcgcggggtgttgcgggatcgcgtgcgccggctccgacgggccggccggcagttgcagaaaaccatgtgtcaggggaaccgggttgaataccgggccgcagagggtgagggccccgtacctgaacgcgcatggtctgccgatcgcgtctcccaagtagcacgggtcccgtggaaccccgtgcgaatccgcccagaccgttgggtaagcctgaatattcctgtctgaccgatagcgaacgagtaccgtgagggaaaggtgaaaagtaccccgggaggggagtgaaacagtctctgaaaccgtgcgcctacaatccgtcggagcccttttgtggggtgacggcgtgcctatcgaaaaatgagtctgcgagtcagtggcatgtggcgagcataacccgtgtggggtatgcgtagcgaaggcgagtcttaaaaggcgtttgagtcgcgtgtcctggacccgaagcgggatgatctagccctgagcaggttgaagcgcgggtaagaccgcgtggaggaccgaacccacctgggttgaaaaccggggggatgacttggggctaggggtgaaaggccaatcaaattccgtgatagctggttctctccgaaatgcatttgggtgcagcgtcgggtcattacgtcccgggggtagagctactggatgcttgcgggcccgtatcgggtaccaacagcaaccaaactccgaataccggtgacgcgtatcccggcagtgagtcggcgggggataagcttcgtcgtcgaaagggaaacagcccagaccgtcgtctaaggtcccgaagcgtgtgctaagtgggaaaggatgtggagtcgcatagacagccaggaggttggctcagaagcagccacccttgaaagagtgcgtaacagctcactggtctagtggttccgcgccgacaatgtagcggggctcaagcacaccaccgaagacgcggcagtattttgtactgggtaggagagcgtcccatgaggggcgaagcggccgtgtgaacgcgccgtggacttcatgggagtgagaatgcagacatgagtagcgagagacgggtgaagatcccgtccgctggatgaccaagggttccagggccacgttcatcgtccctgggtgagtcgggtcctaaggcgaggccgacaggcgtagtcgaatggatgaacgggtcgatattcccgtaccggctttcagccgccaaaaccgaggcttggagtactaacctccgggtccgggcttactgctccttcgggggcgggatgccctggcctgttgggaccgatccttgtagtaggtcagcgcaggagtgacgcagaagggtagccggccgcggaggtggtcttccgtggtcaagcacgcagggcgtgggacaggcaaatccgtcccgcatgggtccgaggtgcgatgatgggggccttatggcccgatatccggtgatcccggctgccgagaaaagcttcggcgtcaggctcaaagccgcccgtaccccaaaccgacactggtggtcaggtagagaataccaaagcgatcgagcgaatcctggtcaaggaactcggcaaatcactcccgttccttcggtttaagggagacccccgatggtgaacacgcttgctgtgggagcttttgggggtggcacagaccagggggtagcgactgtttaccaaaaacacaggtgcatgcgaaggcgcaagccgctgtatatgcactgacgcctgcccggtgccggaaggttaagaggatccgtcagccttcgggtgaagcggtgaattcaagccccggtaaacggcggtggtaactataaccatcctaaggtagcgaaattccttgtcgggtaagttccgacctgcacgaatggcgtaacgacttccccactgtctcgaccaggagctcggcgaaattgcagtacgagtaaagatgctcgttaagcgcagaaggacgaaaagaccccgggacctttactataccttggtattggcattcggtgtggattgtgtagcataggcgggaggccgagaggcgcggtcgccagatcgcgcggagccgtaaggtgaaataccgctctgttcgcattggatgtctaacctcgaacagtcatcctgttcagggacagtgcctggcgggtagtttaactggggcggttgcctcccaaagagtaacggaggcgcccaaaggtccgctcagcccggttggcaatcgggtggcgagtgcaagtgcacaagcgggcttgactgcgaggacgacggtccgagcagggacgaaagtcgggactagtgatccggtgccggtgtacggacgcggcatcgctcaacggataaaaggtaccccggggataacaggctgatcattcccaagagtccatatcgacgggatggtttggcacctcgatgtcggctcgtcgcatcctggggctggagcaggtcccaagggttcggctgttcgccgattaaagcggcacgcgagctgggttcagaacgtcgtgagacagtttggtctctatcctctgcgctcgttggaatgctgaggaggcctgcccatagtacgagaggacctgggtggacgaacctctggtatgccggttgtcacgccagtggcacggccggttggctacgttcggaagggataaccgctgaaagcatctaagcgggaagcctgctccaagataagcattccgtggaaccttcgagttcctgtagtccccatgcagaacacgtggtcgataggccggacgtggaagccccgcgaggggtggagccgaccggtactaacggacgaaaggcaacaccaacattccaacccctggcggttggaccgcatcttcctcctgcaaacgacaccagacggcaatgagcattgtctggccacaagacgaaacatcgacatatccgcgtccgctgtccggttcccaggccgccacaggccggcagaccccagcgtctgaccgtataagagaagatttgcggcggccatggcccaggtgagacgcccggtcccattccgaacccggaagctaaggcctggcacggcgatggtactgcacccgacagggtgtgggagagtagcacgccgccgcaccacacgtacaggaagccccgatacccctcaaaggtaccggggcttcccgcatatcaggacacttgcgcgtggggggggggggtgtatctcgcgtccttgggccccggcaggagtatcccgtcggggcccagtgcgttttgggcgttaacccgctgaatacccggtaagatgtctgaggtatcaacaaacaggtcaggaggtgacgcgcatggtggcgccaagccgtgatgaccgtagcgtagatgcattggtgaaatccaaggcagtacttgatgtattggcggaactgggaccaagcaccgcaaaaaccataagcgaacgtactggtgaacccgtaagctcaacgtatcgtttgctggataatctcgtcgcagtcggttgggtggaacggggcatcaatcgtggcgagtatcggcttggcatcgattgcgtacgtatcggcggccaaatcgaaagcagactggacattcagcagatcgctcgccgtaccttccgtgcccatcgcggccagttcggcatctggggtctgttcgttcggaggcgattgcgcacggtgtgcatcgagacacgcacccgtgagatattgcaaagctatgcacagctggtgggcaatagcttgcctctgagcatgagcgctccctctcatgtactgacggcctggcttcccccggctcgctacgagcagctgttggaacactatgcctataccaacgagctcggcggcacattctccacgatgcgtgccacagcaatgggacaggctcgtcatatacgcgaatgcggcttcacctatgacgtcggccagaccatggccggctccgtgactatcagcgtaccggtattcaatcacgccggagagattcaagcggcaatcgccctgagtggcctttcccgctccttggaacctgagctggcctgtctggtagatgggcaaccggcaacggcatcggctcaagacatggtgcgattggtgcagactgccggccgtgaggtgtcgcgaggccttggatacagtggtgatcatcttggcctgaacagttgaatatgatgagtcagggataagtcaggggaaggaacgtcgacgatggcggaagacaaacgtgaaccgacccgcgctttagacaaggcgagtcgtgtggtggacgcattggcggcggagaatggcctgtcgccggcagatatcgccgacgcctgtgatatcccgcgatcctccgtataccgcgtgctggatggactggtcgatgtggggtgggccgtaacggatacggatggtaactactcattatcactggactggctgcgattggctgatgccgctcgcacgtctcgtaccgaatggcagcctgcgattgcggtcatgcatgccatcaccgcgcaaaccggcatgacctcattcctcagtgtggtctccggcactgaattggtatgcgtggaatgtgcgcaaggtcatgccatcgattcgctgatcctgcgcccgggccgcgtgctgcctctgcatgctggcgcggccggccgcgtggccttggcgtatttcgaggatgccgatgtcgaacgctatcttgcaggagtgccgtttccggcatataacgagaacacgctggtcagtgtggaacagttgcgcgaggatattcgcttgactcgcgaacgtggatatgcactgtcggatgaggatgtgacgttgggtgtcggtgccgtcggtgtaccgattgtggacaacgagtccggtcgcgtgatcgccagcctgtccgccggtggattcgtggacgaagtgttagccactcaaaaatccttggccgcgttactgcgcgatggcgtacgcgaaattcaggcagcctgattcggcccgctaggctgtcgggctggacggttatgtccggtcagctatggcctttgccggctacggttctgctggttatgcttctgcccgactacgctgcggtccgttacgcttcggccacacgacccaacgcgatggcggtgatcagcacgtacgcctcgcgcgggtcggtggcatcccagccggtggattcggcggcgcgcttcaaacggtagcggatcgtattgggatgtacgttgagctccttggccgtggtctcgagcgaaccgccgaacttcaggaatgtggagacggtgagcagcgtcggatcatccgggcctgctgctgtcaggcttccgtagaccacgcggaccagttcgtcacgggcgtccgcgtcgccgatcaacgcacgttcgggcagggcgtcgtcggtgcgtaacgggcgcggcaatggctgcacggtggcggccagggccggcgcggcctgaagacagtagagcgtggcctgaatcgaacgcatcgcgccatcggcaccggtgcgctgtggacccaaggcgattggccgatcggcggcgaacgacggggcgatggtattgcagatgatttccggcgtggccgcaccgaccggacgaatcaacgccactacggcggtgctgttgccgatcgggcgcttggcggtcagacacacaccgccgaaatcggccacgattttctcgatttccttggccgtacgtgcggcggaccgggcagggtatccggcgatggtgtaacaatcgaagtcatgctcgaaaccgaggatggtgaacagggactccactcgttcgtcggccagatgattgaacaggcactcgaacagcacggtgcgtacgcggttggtcgcggtgatgccgggtgcggccgaatcggatgaatcgggcgcacccggcataccggatgcaccggacgaatcggcaacgtcggcagcaagaagttcgagaaaatctgacatagtcactagtgtagcgtcgctgattggcgttgcctttcagccaaagactctcgccaatacgtcagcaccacgaatccgaatacaaacgcaaccggcaacatgtgccgctcgaaattattggccggcgcggtaatcatcacgcccatcagcagtagcagcggaatatgggtcatgagggtgagccaacgtcggcgaatcacctcggccgcgccgatcagcaatgtcatcaccacgtagaaattgccgtgcgtaggccagccgaacacgggaatactgccccatacgcgagtgaagccggcgatgtgctcacgccagtcatggttgtaatccttgatccatgtggagtttttctgcacgtaatcgctggccacgtaataatccatcgatacgtacggctgatcgttcacattgaagtatccgaagcatttggccagcaacgcatccagcgcgatgatcggattgtccttgacgatttcgaaccatgccttgttgaaattggtcatatcctcgggcgtcaccgtgcgccacttgtagctgaccttcttggcctgaataccggaggatttcaccgggtcggcatcctgctgggagtaagcgtcggccatctgatcgagattgaagacgggcgcgaggttctttttggcttcgtctgaaataccgtccggattgcgctgagccacgcgggcgatcatttgcagctgtacgccgcggctttcgattggatcgccgccgatgatcgcaccagaggagatggcgaaggagatgccgccgtgaatcagtacggtggggatgagcagcgccacgacgtaagtcgcccagcgtttgcggtcggcgatcagagccagcacgatttgcagagcgatgatgtaccacgcatatttcgcggaaatcagcatcaccgacgtggccaggatgaaggcgatgaagctgtggcacggcaagtggacgggcgtggcgatggcaggggtctgaggatgtttgcgggtgccggcggggtgccaggtctggacgagttcataccagacgctgaaccaccagacgaacgagaacgcgaacagcggcgatttggtgatggagatagtggaaaacacggccagcgggcagaccatgaagaacagcagaatcaggaatctggccaatcctccggcctgtgggggaacggcggaatccgttgccgtttttcctatccaaggccggttcaggaatcgattggcggcggcagcgcagcagaacacggcgaacagcgtctgcagggcagccaacgtcacgatgccggcatcgtttgagccggtcagatgcctcgcaaacgtgactatcgcgccatagaacacagtgagtaccacattgtgctggtcggtcagatacgtgggatcggacggccacatgtagtgcgcggtggggtagatgtccatcggcacgaaggagaagaagccgatatagggctgtttcaggccggtccactggttccaggcccagctgaattcgcggatctgtgagcggaggtccgcgccgaatgcggccagcagagtggtcggcacccagagccagccgacaaaaaacaccagcataagcttccagaaccggttcgtgccgcgtgtgatccagcggtccagaacagtgacggtggacgtgacgatagcgcgaacggtacgacgggtcttggctggttggctggcctgctgatcggcggcgggccgtgatgtttcgctattccgctgatggtggcgtaggcgctcgccgatggtcttcggcagtatgcgctggcctgctgcgaatcgcgccatcagcgtgatgattccgagatatatcaggaacgacacgacgaatattgcggtattggcccagttccaatgggcgagggtgccgttctcctcgtcccggtacagcgggccgaccgccgagcacagtgcaagccacaggcaggccagcacggccagtgtccagcgcgcggcagcgcccacgcgcgcaagatgcgggtgggactggcggctggatacggcggcaagcttcgcggtggctggtgacgtcatgacaatatatggtagccgcacaggtcaacggttgatattcgatgtctgccgggcatcgccattgttcgcaagccaatacgacggccgggtgcatgcgtggggtcggcgaatgcggaatttccgaagttgtgaacgttaacacgggctgtccggcccaaaatggttgattttgtgcgcttttccgtggaatatcgcgggcaaaaaacggcgcaaccgaggtaacgtagtgcccatgatgattgcgttgaaagctgcaacgccgcagctacccagaactacagccgtcgcggatcatgtggtcgccgtggacgaaaccggttcgaccaacgcgctggccgtacagatgatcggcgacgggtcgttgacgttgcccgaccaccaggatggcgaactggcggtggccgtggtggccgccgaccggcagaccgccggccgtgggcgcaatggtcacaagtgggtcagtcagcccggccgttgctcgacgatgtcctatgccatgcgcattccgcgcgcgatcgccaccgacgaatccgtcaatggctggctgcagatgatcgccggactggtcacgctggacgccctgaacggcatgatcgaggaatacggtgccgcgccgaaccagccggactgcttgctggaactcaaatggccgaacgacgtgttctgccacgggctcaagctgggcgggctgctctcggaactggtgattccgccgtcgtccggtactgatgccgatgccgatgacgacgtcgtcatcgtgttcggcgtaggcctgaatctggcgctgggtgcctgttggctgcccacgccgcagtcgacttcgctgcagctgcatgtcacgggcttgccgtcgtttggcgagatgcgcgatgcggtggccgaacgtcaggtcgagggcttccgtgaacgactggcgaagttcatcgccgacccgaagggccaggccgagtcgttgcgcgaggaaatgaaggcggtgtgctgggcgcgcggccgtcaggtcgaggcgcatttcacggacggcaccacgctgaccggcgaagccatcggcctcaacgaagacgcctcactgatcctgagaacacaagacggcacggaccatacggtccgcaccgccgatgtgggagtgctgtaatagccggccagtagctagctagtagctcaggtcagcgaccgagcttggacaggccggcggcggccagagaggccaccacggccttgatggcgtcgccgacgacgaagcccatggaggccagggccacggcggcgagcggcgcaccggtcaacgcggactggatgatgaagccgaaggcgtacaccaccacgacgccgccgaccagcgcggccagcaggtagcggcccgcggtgcgcgcggcggccgcgaaggacgaagtgtcggacttgccgcgcagcagggcgatgaccaccacacccggcaggaagccgaagaggaagccggcgctcgggccgaccagggccagcgtggaggtgccgccggcgaacaccggcagaccgaccgcaccggccgccagataggtggcgacggcggcaccggcctgacgccacggcagcatgagaccggcgagcatcaccacgaacgtctgcagcgtgatcggcaccggcgtgcccggaatcggaatctcgccggcggccgcggacagccacatcagcacggcgaacagcaccggcttccaggatgcggcgacgatacgacgggcgagcggcgtggtggccgttgcggatgcggtggtgtgtgaagtctgcatatcaataacccctatgttgtgtgatatcgccgtgaacggcgggcggtatgcgatggatgaggggaggttccggcgggccgtgcggtatccccgacagcccgaaccgtccatatggtggacggtcccaaatgaatccggccctgtgcgggcgaatcgtgcggcgatggaccgatgccggtccggtcgccttccgttcgcccgcagatgagccttcccccgaacttacggttgccatcgtagaggtgttcgatttcgtgcggtttcgtaccaacttacaaaattgtcgatttcgatttgtcataagttgacgaacgcaaccgtaacgtcaacttcttgaaccggcgcgcaaggatgtgcaatcggcggatttgcaacgtttttgatagccggcgccaacggttacgttgccggaacctacgcgcgcgtttgttcgtagcctacaaaagggcgtgaaagcttttgtgcgaacgcggcttgccctctcctctatatggagagcacaatttgacactatggctcatactgtcaaaaaactgctgattgcgaaccgaggtgagatcgctctgcgcgtggtgcgcacggccaaggagatgggtatctccaccgtggccgtctactccgaacaagaccgcaatagccgctatgtggacatggccgacgaggcatacctgctctccggcgacacctacaaggacacgtacctcaacgaggatctgctgatcgacatcctgcacaaaaccggtgcgaatgccgtgcaccccggctacggattcctttccgaagtgccgagcttcgcgcagaaggtcgaggatgccggtgcaatctgggtgggtccgcaccacaccgcgctggtggatttgggcgacaagatcaccgcccgccgagtggccttgcgcgccaaagtgccgccagtgcccggcctgtccgaaccggtgaccgacgtgcgaacgctgctcgacttcgcacacacccacggctacccgatcatgatgaagcgcactgatggcggtggcggccacggcatcaccgtggtgcatgacgacgaggagctgcgccgcttctacatgaaccacgacgcgctgcaaggcggcgatctgaaggaatacttcatcgagaagttcgtggacaaggcacgccacgtcgagacccagtccgggcgcgactcgcacggcaacttcaccgtgtactccacccgtgactgctcgctgcagcgccgcaaccagaaactcgtggaagaggcgcccgcgcccttcctgtccgaggaaatcgtcagcacgctggaggaatactcccgccgcctgttcaccacggtcggctacgtgggcctgggcacctgcgaattcatggtgaccccgaacggcaaagtgtacttcctggaagtcaacccgcgtctgcaggtggagcacaccgtctccgaagaggtcagcggcctcgacctggtgcgcgaacagctcaatatcgccgccggtggcgagctcacccgcgcccccgaaccgcgcggccacagcttcgaactgcgcatcaccagcgaagacccggccaccaacctgacccccggctccggcaccttggagaagatccagtggccggccggccccggcgtgcgcatcgataccggtgtggaacagggcgacaccatctccccgaagttcgattcgatgatgggcaaggtcatcgtcaccgcccagaaccgtctcgatgccgtggcccgtgtgcgccgcgtgctcgacgagctcgtgatcgaaggcgtgcccacgccgattccgctgttcaaggagatcttccgcaacgacgacttcaccgccgagcatggccatccgttcgccgtgtccaccaagtggctggagcgcacgtacctgaaccgcacaccggcttccgccgcctccggccagccggcctccttggccaccgccccgggtgccgctgccccggccgcgcccgacaagtccaagtcggagacgttcgtcatcgagatgaacaaccgccgcgtcaagctcaccgtgccactcgacatcgtggagaacatcaccggctcggcccgcgcccgcggtgccaagcgccccacccagccgttgcgcggcgcaggcttgcacaacgtggcctccggtgccgccacggccaacgacggtgccaaatccggcgtcatcgcctccccgatgcaggccgtggtcacgcgcatcaacgtgtccgaaggccagcaagtggccaagggcgaccttctggtggtgctcgaatccatgaagatggagaactacgtgtacgcgccggccgccggcgaagtgaagaagattttcgttggcccggccgacggcgtggaggccggcgacacgctggtcacgctggacgtgaacgccggcaaggccaaggccgctgcggctgcgccgggatctctccctcagtcggctgcgtcgacagctccctcgtcagaaggagccgataaggccgccgacgccaagaaggagggtggcaatgactgacatcatggattcgccggccgtgaaggccgcggctgcggcctcggccgccaacgccgcccagccctcggcccaccagccgctgcgcaccgccgtggtcaaggccgccgaactggcccgcgccgccgaagagcgcgcccgcgacaagcagcacgccaaaggcaagaaaaccgcgcgcgaacgcctcgacctgctcttcgacaccggcacgttcgaggagatcggccgcttccagggcggcaacatcgccggcggcaacgccggtgcagctgtcatcaccggcttcggccaggtctacggccgcaaagtggccgtctacgcccaggacttctccgtcaagggcggcaccctcggcaccgccgaaggcgagaagatctgccgactgatggacatggccatcgacctcaaagtgccgatcgtggccatcgtggactccggcggcgcccgcatacaggagggcgtggccgctctgacccagtacggccgcatcttccgcaagacttgcgaggccagcggcttcgtgccccagctgagcctgattctcggcccctgcgccggcggtgccgtctactgcccggctctgacggacctcatcatcatgacccgtgagaactcgaacatgttcgtcaccgggccggacgtggtcaaggcctcgaccggcgagaccatctccatggccgaccttggcggcggcgaagtgcataaccgggtgtccggcgtggcccactacctcggcgaggacgaatccgacgccatcgactatgcgcgcaccgtgctcgcctacctgccgtccaacagcgaaagcaagccgccggtctacgcctacgccgtcacccgcgccgaacgcgagaccgccaagcgactcgccaccatcgtgcccgccaacgaacgtcagccctacgacatgctcgaagtgattcgttgcatcgtcgattacggcgaattcgtgcaggtgcaggaactgttcggcgcctccgcgctcgtcggcttcgcctgtatcgacggcaagccggtcggcatcgtggcgaaccagccgaacgtgctcgccggcatcctggacgtcgactcgtccgagaaggtcgcccgattcgtacgcctgtgcgacgcgttcaacctgcccgtggtcaccctcgtggatgtgcccggctacaagcccggctccgaccaggaacacgccggcatcatccgccgcggcgccaaggtgatctacgcctacgccaacgcgcaagtgccgatggtgaccgtggtgttgcgcaaggcgttcggcggcgcgtacatcgtgatgggctccaaagccatcggcgcggacctgaacttcgcgtggccctcctcccagatcgcggtgctcggcgcggccggcgcggtgaacatcatccaccgccacgacctggccaaggccaaagcctccgggcaggacgtcgatgcgctgcgggccaagtacatcaaggagtacgagaccagcaccgtcaacgcgaacctgtcgctggaaatcgggcagatcgacggcatgatcgaccccgaacagacccgtgaggtgatcgtcgaatcgctggccacgctcgccaccaagcggcgcgtcaagcgcaccaccaaacaccacggcaaccagcccctctgatttctgaagacatcaaccaaacacaagtaaggaaagcaatgaccaccttcttcctcaatcgcctggccaccgagccccatgcgctcgccttcgccggccagtccaccccgtggccggtagccctggcagaccagaccaccgatcccagccttgacgaggccctgcgcggccacatcgccgcagccaaccgactgctcaccccggtcgccgccgacctgctgaccaccaccggccgtccggtcgacctgttcggcttcactccgaacccggcccgcctcggcgccgcagccgacgccaccgcgtccgtggaaggcgtggcactgacccagctcggcgccctgctcgacctcgaacacctcggctacagcgtggcccaggccaagccgctcgccgtgctcggccactcccagggcgtgctcgccgtgcacatggcccgcgccatcgaggccgccggctccatcgaggccgccggcaagaccctcgacgagattctggccgtcgccgccctgatcggtgcagccggaacccgccgcgtgcgcgaactgggcctgaaccccaagtacggcgaagccagcccgatgctctccgtcaagggcgccacccgcgaacaggttgaggctctggtcaagcgcgtgaacaacgcccgaggcccgatctccatcgccgtcaccaactccgacaaccaccacgtgctttccggctacccggaggacctgtctgccttcgccctcgaagccgagcgcgagcacaagcatcaggccaagctgcgcgagcagaagctccacggcggcaccgtgttcaacccgaccctcgaataccttgaagtcaccctgcccttccactctccgctcatggccgaagctgttgagcggaccgtggcctgggccggcgcctgcggcttcgaccaggatcgcacccgcgcactcgctgcggaagtgctgctcaaccatgtggactggaacgcccgcgtcaaggcgctgttcaacgccgccgacccggccaagctgtggatcgtggacctcggccccggcaacacgctcggcaagctgatcggcaacgtggtgcagggcaccggcatcggcgtggtcgaagccaccacgctgtccgaacgctccacgctctccacgctggaaagcgagcctgagcgcacccagaactggaaggcgttcgccccgcgcgtcatcaacaccccggccggcgccaagctggtcaccaagttctccaagctcaccggcaagccgccggtactgctgcccggcatgacccccaccaccgtggaaccggaaatcgtggccgccgcggccaacgccggctactgggccgagcttgccggcggcggccaggtgaccgccgaagtgttcgaccgccacatcgccgccctcgaagacgagctggaggaaggccgcacggtcgaattcaacgcgatgttcatggaccgttacctgtggaacctgcagttcggctcctcccgcatcgtgcccaagaagcgtgcttccggcgcgccgatcgacggcgtggtcgtctccgccggcatccccgagctggacgaagccgtggccctgatcgagtcgctgcaggcggacggtctgccgtacgtgagtttcaagcccggcaccgtggaccagattcgccaggtcgtgcgcatcgccaaggccgtgtcccccaccaccatcatggttcaggtcgagggcggtgaagccggcggccaccacagctgggaagcgctggacgacctgcttgccgccacctacgccgaagtgcgcgcctgcgacaacctcgtgctggtcgccggcggcggcatcggcacccccgaacgcgcggccgactacatttccggccagtgggcccacgcctacggcctgcccgacatgccggtcgacggcgtgcttatcggtaccgccgcgatgaccgccaaggaggctcacaccagccccgaagtcaagcagctgctcgtcaagacgcccggtattccggccgacgccaagtccgacgacgtgttcgccccgcaggccgcccactgggtgccgtccggcaagtccgtcggtggcatgtcctccggcctgagccacctgcacgccgacatttacgagctcgagaacgactccgccgaatgcggccgtctgctcgtgcgcgtcatgaagcaccccgaagagctcgactcccgccgcaaggaaatcatcgaagccctgaacaagaccgccaagccttacttcggagacctggcctccatgacctaccttgagtgggcgcagcgcttcgccgaactcgccttcccgtgggccgacccgacttacgccgaccgcttccagcacctgctgcagcgcatcgaagcccgtgtgaacgacacggactccggcgaattcacctccaagctattcgtcgctgatggcgtttctgctgaagaggcagctgccgctgacctgctgacccacgacgacattctctccgatccggcccccgcactcgaaaagctcgcactggcctacccgcagaccgccgaactcaaggtggttccggccgacgtggcttggttcccggtgctcgtgcgcgaataccccaagcccatgccgttcgtgcccgtcatcgacaacgacctgctgcgttggtggggtcaggaccagctctggcagtccgaagaccagcgctactccgccgattccgtgcgtgccatccccggcccgatctccgtggccggcatcaccaccatcgacgagccgatcgccgacatcctcggccgcttcgaaaccgccgccatcaagcgcgtgcaggacgaacagcaggccgccgatgccgctgagaacgacgatttcgccgcactcggcgaggccaccagcgccgaggacttcatccgcaagtccccgaacatctcctgggtcggccacatcaccgacaaccccgcctacggcaccgccctgggcgaccagtactacgagatccgcgcgtttgacgccgcggccggcaagtacgatctggacatccacctcgacacctactgggacaacgacccggacggcggcacctccaagcacgccgtgcgcgatatcgtcatcccgctcatcgtggaaggcgccgagcccggccgtgtgccggtcgtggaccgcgaacgcctgattccggacgtctacgcgatgctcgccgccaccgcaggcatcggcaacaccgccatcaccggcgacaagctcaccgagatgccgcagcttgacggcaagacctctgacgagcgtccgtttgctaccgccaccgccgcctacaccctctctgccaacctcggcttcgaccacgaagcggccaccggcgccgctctgccgacgaccctgcagcccagccgcatcgctcccgatgcgctggtcggcccggcctggccggcgatttacacggcgctcggctccgtgtatgtcaagggctacccggtgattgaaggcctgctcaacgccgtccacctcgaccacctcatcgaacttgaggtgaacgaggaggacctgcttaagcacaccggtgaaaccatcaccctgaagtcttgggctgaggattacttcgagtccgcctccggccgcgtggtcaccatccacgtgacccacaccgctgccgacggcatgctgcttgcccgcgaaaccgagcgtttcgcgatccgcggccgcgtctactccgatgctttgccggcagacgcccccgagttcggcgacgccgagcacgaggagatcgcgcccacgccgcgccgtctgctgcgccgcgtgaaggtcgtcgccccacacgacatgaccgccttcgcccgcacttccggcgacttcaacccgatccacacctccactcgtggcgctcgcatctccggtttggccgctccgcttgtgcacggcatgtggctgtccgccaccgcccagcacgccgtgcaggcgctggacgagaagggtgcccactacgagattgccggctggacctacaacatgtacggcatggttcagcttgacgacaccgtcgaaatctccgtcgagcgcgtcggcaaggtgcgccacggcggcatgaccctcgaagtcacctgccgtatcgacggccagctcgtctcccgcggcaccgcactggtccgcgcaccgcgcgccgccttcgtctaccccggccagggcatccagaagcagggcatggttctggacgagcgtgccaagtccgccgccgcccgcgacgtgtgggagcgcgccgacaagctcacccgctccaagctcggcttctcgatcctgggcctcgtgcgcgataacccgaaggagctcaccgccaacggcgtgacctaccgtcaccccgaaggcctgctcaacctgacgcagttcacgcaggtggcgctcgcgacggttgcttttgcccagaccgcccgtctgcgcgaagccggcaccgatatctggcctgcatacttcgccggccactcgctcggcgaatacaacgcgttgtccgcattcgccgacgtgattccgctggaaaccgtgctggagctcgtgttccaccgtggttccaccatgcaccacctcatcgagcgtgacgcgcagggtcgctccaactaccgcatgggtgcccttcgtccgaaccagttcggtgtggacgacgcgcacgtcaaggaatatgtggaatccgtggccaaggcgtccggcgaattcctggagattgtgaactacaacctcgccggccagcagtacgccatcgccggtacgatcgccggactcaaggccctgaaggccgattccgcccgccgcgtggccgcattcggtggcaagcccgcgttcatgctggtgcccggcatcgatgtgccgttccactccacgctactgcgcaagggcgtgccggaattccgcgacaagctcgacgcgctgcttcctgcttacatcgactaccgtggccgtctggtggaccgctacatcccgaacctggtggccaccccgttcgagatgaccaaggaattcgccgccaagatcctcgaagtcgtgccgtccgagcgtatcaaggccgcgctcgacgacccggccgtgtgggattcctacgccgatgacgaccagaagctcggccgtctgctcttgaccgaactgctctcctggcagttcgcctccccggtgcgttggattgaaacccaggcgctgctcttcggtcagcgcgaacagggcggcctcggcgtggaagaatacgtcgaagtcggcctcggcaacgccccgaccctggccaacctcggtgccaagaccctgcatctgcccgagttcgccggcaacgatacggtcgtctacaacgtcggccgcgatgaaggccgcgtctacatgaccgacaccgattcgctggttcccgacgacgagccggaagaggctgcggcctcggccccggtcgaaaccgctcctgccggtggttccgccgtcgccaagcttggctcgggtgctgctccggcaaatgccgcgactgaggctgctcagacaacggatggctccgtcgccggacagtccactggactgtccgactcctcgcgcggcctgcaatcagggcaggccgcggctggcgcaccgtccggtgccgccgtcgccgacctgcccttcaaggcttccgatgccatcggcgtgctcatggcctactccgccaaggtgcgtctcgaccagatcggcagcaacgacaccaccgacaccctgaccaacggtgtctcttctcgccgcaaccagctgctcatggacatcagctccgagctgggagtcgccagcgtggacggtgctgctgaagcgacgctcgacaagctcgcccaaatcgtcaacaaggccgccccgaactacaagccgttcggtgccgtgctctccgaggcgctgcgcgaccgcctgcgctcgctgttcggtgccgccggcgtcaagcagcagtacatccgcgaccgcgtgaccaacgtatggcagctcggtgaaggttgggtggccagcgtgctcgccacactgctgctcgacactcgcgagggtgccagctcccgtggcggcgacctggctaagctgcccaccgccgccgtgcagaacaagccggaagccgacaagctgattgatgcggccgttgaggtcgtcgcccagctcaagggtgttgccgtggccctgccgtccgccggtggtgccgctggtggcgctgtggtcgattccgctgcgctcgacgccttcgccgagaaggtcaccggttccaacggcgtgctcgccgccaccgcccgcttcgtgctgaacgagctcggcgtggccgctccggctccggaagaatccgaggacgagaacgccgccgtcgtggccgcggttgaagccgaacttggctccgactggcccaagcaggtcgctccgcgcttcgacgccaacaaggccatcctcttcgatgatcggtgggcttccgcccgcgaagacctcgcccgcgcctactacgacaacgatcccgccgccctgaacggcagcttcatcggccttggcaagaccatcgccgccgaagcccagtggttcgccaacgagtcggagagtgaagaactcaaggccgccttccagaaggccggctccgaggccctcgaacaggttgcgtccaacaagaacgcctcccgttacgcgaatgatatcgccatcgtcaccggcgtgagcccgaactcgattgccgctcaggtggtcgaaggcctgctcgcaggcggtgccactgtggtggccacctcgcacagcttcaagccgtccattaaggcttgggctaagcaggcctaccgcgagcacgctaccggcaacgccaagctgtggctggttccggccaacctctccagctaccgcgacgtcgacgcactggtcgactgggtgggccacgagcagaagaagacctccggtgctaccaccacgattctgaagcctgcgtgggagccgaccctgttcttcccgttcgccgctccgccggtccatggcacgctcgccgactccggcgacctgttcgaatcgcaggcccgactgatgctgtggggcgtggaacgcgccatcgccggcttcagccacatcggtgccgacaccaacgtgcagcacaagctccacgtggtgctgcccggttccccgaaccgcggcgtattcggcggcgacggtgcctacggcgaagtcaagagcgcctttgacgccatcgtcaaccgtgcccgcgctgaaaaggtgtggtcgagccgcgtcaccttcgctcacccgaagatcggctgggtgcgtggcaccggcctgatgggcggtaacgacccgctggtcgccgtcgttgagcgtcacggcatccgcacctactccaccgcacagattgcggccaagctgctcgacctgtgcactgccgaatcgcgcgagcaggccctcaaggccccgctcgatgtggacctgaccggtggcctcggctccgagcccatcgacatcaaggccctgcgtgccgaagccatggccgacgtcgagaaggaagctgctgcggcctcgtctcaggaaacggatggctccgtcgccggaaagtccactggactgtccgactcctcgcgtggacagcaaatcaaggcgctgcccaccccgatcgtcaccaagcaggctccggtcgacttgaacgattggaccaacgtcaccgccaagccggaagacgaaatcgtcatcgtttccgtcggtgagctgggcccgtggggctccggtcgtacgcgcgcccaggccgagctcggcatccactcggacggcaccgtcgacctgagcgccggagcagtgctcgaacttgcgtggaacatgggtctgctgacttgggccgacagcccgaagcccggctggtacgacaccgacggcaacctcgtgcccgaagaggacatcgccgagcgctaccacgacgaggtcgtggcccgctccggcatccgcccgttcgaggaaggcatgggcaacgactacaaggacggtgctgacgaagaggaagccgaggtcttcctcgaccacgacgtcaccttctctgtgcccacccgcgaagtcgccaccgaatacgtcaagttggacgaggctcacaccaccatcgccccggatgaggaatccggcgaatggaacgtgacccgccacgccggctcgatgatccgcgtgccgcgccgcgccaccatgacccgcacagtcggcggccagttcccgaagggcttcgacccgacccgatggggcattcccgcctcgatggtcggcgacgtcgacaagatcgccctgtggaacatcgtcaccactgtggacgcctacctgggcgccggcttcaccccggccgaaatcctcgagtccatccacccctcgctggtggcttcgacccagggcaccggcttcggtggcatgatgtcgatgcgcaagctgtacctcgaccgcttcctcaaccacgagatcccgaccgacatcctgcaggaagccctgccgaacgtggtcgcggctcacgtgatgcagtcctacatcggcggctacggcaacatgattcagccggtctccgcctgcgccaccgcagccgtctcccttgaagagggcgtcgacaagatcgccctcggcaaggccgacttcgtggtcaccggtgcgatcgacgacatcggcgtggaatccgtgatcggtttcggcaacatgaacgccaccgccaactcggaggaaatgtatggcaagggtatcgacgcgcgcttcttcagccgcgcgaacgatcgtcgccgtggcggcttcctggaatcccagggcggcggcacgatcctcgtgacccgcggtgacatcgccgaaaagctcggcctgccggttgcggccgtggtcggcttcatccactcctacgcggatggtgctcacacctcgatcccggctccgggcctcggtgccctggctgccggcctcggcggcaaggactccaagctcgtgcacgacctggctaagctcggcgtctcagccgacgacatcgccgtggtctccaagcacgacacgtccaccaacgccaacgacccgaacgaatccgagctgcacaacacgctggcccacgccatcggccgcaccgacggcaacccgctgttcgtgatctcgcagaagacgcttaccggccacgccaagggtggtgcctgcatcttccaggtcaacggtctgacgcagctgttcaagtccggcgtgattccggcgaacgcggcgctcgactgcgtggatccgaagctccagcgcgacgaccacatggtctgggttaggaagcccctgcgcatcggcggtggtgaggacgagttcggtcgcgagaccgctggtcgcccggtcaaggccggtctggccacctcgctcggcttcggacatgtttccggcttcgtggctctggtccatccgggtgccttcgaggcggccgtggccaaggccgatggtgaggccgcactggaagcttggcgtgagcgtgccaacgcccgcctggccgccggccagcgtcaccttgaggaaggcatgatgggtcgcgccgcgctctacgagccgatcgacaaccgtcgcttccgcgaggatcaccgtggctacgaccaccacgaggtcgaaaaggctatgctcctcaacccggacgcccgcctcgacgccgacggctactacgaggcctgattcctctggctcccctctttgaggggagctcccgcgaagcgggtgaggggagtttcccctggagctttctcgctggcacaaactcagtgagagaaatatgcagaacatacgaaatcccctccctcggagtgagctttctgcgtttcaaggggctgatttggcattcgccggaggtctacttccgtttcaaggggctgttgcccaagtagacaaggcgtaaaaacggcggaatggcgttggcgttatgctgcggatactcgtggtatggaggatgaccagccccttgaaacggaagtagacctccggaacggtcaaaatccgcccctcgaaacggagatagacctccggggcggggcgcggatgttttttggacggctaggcagccagcccaagatgtttgcggtattgcgcgaggtcatccagcatagtgaatcttttccccctgaaatggaaatcaggccccaattctgatgaggtgtagagattacgcgcgaagcggtacacaataggaagcatgaatacttgtggtttggggcatgacgtggtggatgtggccgcattcgccgaacagttggcggagccggggtctcgcatgcgtgcgctgttctccgtgcgtgaggtgcggcaggcatccgaccgcgcgcgccagaagaatgacggggaggccgtccatctggccgccaaatgggcgggcaaggaggcgttcctcaaagcctggtgcgattatcttggcgatgccccctatccgttcacgcttgataatttcccgtggcctgaaatcgagatcttggacgattcccgtggtgtgccgcatgtgtctctgggtaagggggcggcgtcagtcttccaaactgattacgcgaattcggctgccggcgctcgctattcctctgcttattcccctgcttccgataacgggccttatgcagtgatgcaggagcggcggaatgcgcgttcggcgcagcgctcgactatcggtgcggggtcgatgccgcatatccatatttccctgagccacgatggttcgattgcctccgcggtggtgacgatttctgtggaatagcgcccgaggcccccgagtgctacatgctgtacaacgtctccatcatggttaacctgtggggcgcgctcaccagccgcgacgtgcgcctgctcaagaaccagatcgacaagctcgactcgctgcccgaaaactgctggttcgtgattctgaatgcgatgggcgccgacctccaaccatacgagtcccagctcatccatttgtgatttcgacggtttctagctcccctctttgaggggagctgtcgccgtaggtgactgaggggagtcctcggcaaagccgcaatccatcaactagattggctggtcctgctgcagccacacgcgtttgccatccccgaagaaatatgtataataactcaagtcgccaaaagcgacgcttaacgcggatgtagctcaatggtagagcctcagtcttccaaactgattacgcgggttcgattcccgtcatccgctccactgaaagaggccgcaaacccttggaattacttgggtttgcggccttcggtgttttcggtgcggaaaacatgccgatgcaagttttccgcccaagtccaccaatttccgcccgaaatgtttgacctaatgtttgacctcgaccgcacgaaaaggaagaggcctgaagcccatgacacagcagaagaacacccgtcgacccaacggaagcggaagcgaatggcgcgacgacaacggagtctggcacgcgaagaagagcgccggcgtcaatccacgaaccggacgacgccgctggatcgaggcgcaggcgcagaccaagaccgccgcccgacaaaaactccagaccaagctcgacaaacttcaacgagaaggcgatctgcccctcgcagacgtccccaccctcgacgtgtggatagaccgatggctcaacaccatcgcgcccaacgtcaaaccccgcaccctcgaaacctaccgatccgactgcaacaccatccgcagcgtcatcggcggaatgcgactcgacagaataacccccgccaccatcgacggaatgtgcgccaaactcgccaaggaacaccgaagcaaaaccgtccacaaccactatctcagactcaggcaggtgctcgacgcagcggtccgcgaacgcctcatcccatcgaacccggcgctcgccgcaacgccgccgcgctacgagtcgcaggccacccaaatcctcgaacccggacagccggcccgggcggcgcaggccgcactcgaccccaagcgtcgcaaatacagccacctggcagataccgacgacgaccgcgaaatgtggagcctcatgtggaacatcatgttcgagaccggcatgagagaggccgaaagattcgccatcctgcccgaagagctcgccaccgtcgacggtgtgcacggaatccagatcatgtgggagctccaacgcttcagatccgatgcagaagtgcccaactggctccgctcccgccattacgagggatgcttctggctcgtcgaaccgaaaagcaagcagggcaaccggttcgtgcccgtcagcaaccagacgtggctcggactctgggcgctcgtcggacgcaggcaatgccagcccggccagctcatattcacgcgcgagggacacccgctcaccaacaccgtggaacgccgccgctggaaacgctctctcgaagacgccggattgccctacgtcaccatccgaagcgcccgccacttcttctccacgcacctcgccgaagccggagccccggaagacgcgagaaaagcgatgatgggccacgcaaaaatcagcacgacggccggatacacccactggtccgccgcaagccttgcggcgctcgccgacaaggctcgtcaggcggtgggggaatcggcctgattgcgattcttgcgcggccttccgccgcccgcaccacgaccggggcgggcggcgttccacgcatcgattgtctccggaagccagccgcgagtcgtgccgatcagtgcgtccggttccggcagatgataccccctcgcggccggattgctcgtgccgatgcgctcgccgacctccttgaggctgagatatcttgcggtgctcatttccggcctcccgacagatagccgaacaccccggcggccatgccgaaggttccggccgcgatggcctgaccgccgatggcgagaatgaggcacatcgcgccacatatcagcgagacgagcctgtatgcgtttgttgtgttcatgatgttccatggattagtctggggatagggagccgcagctccggatactaggactattcggaatctgcggctcttgtactaccggcgaggccttcgccgtatgtgcggcggcttgggcttcggtgcgggtggtggctcgttgcctttggatttcaccgccgcgatgactgcggcgattccgaccagcagggagccgatggcttctatcgctttccagatctcatccatgtctcacctccttccactgttctgctttcgcttacataataattatagctcaactaagtaagttatacaagatggcagtcgcgacacgccggtcgaacgttgcggcaagcggctttatttctggtggtgcctgaagggcggcgaattattccttgatagtaacatctagtgctaaaatattcttttagaagttatccaagggaaacgaaaggtcattggcgtgacggatatcgcgaaaatcgatgagaagcaggcggtcatggaggcctttagtccgctctgcgagtttctgcctgaattcgttcgagactgcaccgcaaacatcaagaaggacctcgcctcatataagcgtcttagcgaccggcagaaatcgcgaatcgcggcatacctcatcaacatgaacatggcgaaggagtggaaagaatttcatccggttaggtggtgggaagtggacaattcgggattcttccacctcatgcacacgcccacgggtgcaatctcttacttccatgccgttgatcccatcacacgtggtatgccgtgttccggtcatacgctggcgggcagggcgcgatacagccagaatggtgcgaagggtgtgggccagcttatggtcaacgtccttggtcaacccgatctgagcgaggtcaagctcaccatcgcctgcgactatctttttcccgaaccggcgttcctgcgcgtgtataagccgataagccccggaaagtatggcgcgaaaggaaaatcggcgtattcgttccccatcatgtcggatggcggtggcggccgaggatggatgccggggttcgacccggaaccagatgacgaaatcgacattctgaagggcctgacaatcgaagagaaggtgggttgctagagttcaatgcggtaaaaacaaaaggagagagacgtgaactataatccggacagggtcatcctgctccgccaggtcgaacgcatgacccagaaaaagctcgcggaaaaaaccggcatagctcaaggaacgctcagtaaactgcaaaaccggcaaatcgatttcaccgatgaggccgcgcgcagaatctcaatggcgaccgactacccgttgtcgtttttcctcgaccaggatcagcccgtccctattgttgaattgacgtatcgccatacgtcaagcgcatcggtcggagaactaaacgccattgctgcggaatatgctctgctccgctcggttgcgcagaagctatcctcggtgctgaggctgcaacccaaaacatcatggattgatgccatagctccaagagaaaatgagctggagcaaagccgcatagagcgcttggcagacagtacccgcactcatctcggactcaatgaatccggcagcgtccccaatctcacgcgcgccatagaaaaaatgggcatcgtggtggcaccgctccatgccttggcctcgaaacagaccgcacacctgaacagcgacggagtgacgcaaccgaactgcaaggatatgccgaccatcggatacagcgcgaaaaacaatacgggtgacagactcagattcaccatcgcacacgagctcggacacctaattctgcatcgataccgcagaccccagctctatcgggaaatggagagggaggctcaccgattcgccggtgctctgctcatgcctcaaaacgacgcgaagctcatcatgtcacagcgcctcatgctcaccgatttggtgcgactcaaagcaggatggggcatgtccatatcatcgatgatcagtcgcgcgagcaacctcggaataatcgacgcggacagaacccgatcgctgcaaatccaacttagcgcgagaggatggagaaaagaggagcctgtacacgtcggtgacgagcatccgatactacttaagcaaatgattgttgccggatacggagacccggccgacccaaataaagggatagatacgttcaaggccgaaaacagcctcaacgtgccattccgattcctagaccaatgggcggatgggctcaaagagcaaggagcctccatgggattcggctcaaaaacatttcggcaagcggacaactgaccgatgctccgaagccgccccggcgctcgcaagagcggccggggcgattccgtatatacggcggtagaatctaaacaagccgcatcgagtcggccgaacgaacaacgaggttggaggcatgatgtcgacgaagaatagaagacttgcatcgcagatgatgaaccctatggagataagccttgccgatgaggtaaggaagacgctgcaggcggaatgctatggcgccgccctagctctttcgctcacaattccggatgcctacgggcagattgcctttccggaagagaaaaaagtcgggaaaagatacatggactggtaccggcaatactgtggatatgcccttagctcaagaatgggtaaggacccgatgccggcctttgatgcccttgcatgttacaagctgcgctgcgaactgcttcacaacggcgatgccaatatggagaccaaatacctgtacgagttggatgaccaagggaagctgatgcggaatgacgtcaatcttgaacgcgtctcgttctcattgcgcattggactgagttcgaaactcggcaagacgtgggaacgtgacgacgaggaaaacgcggagtacagcctcgtcgtatccgtcgaggaactgtgtcttgcgctatgtgatgccgccgaccgattcgaccggaatacagaaacgcaatgccgacctgaactgcgaccgcggatagtcatagatgatttaaggaacgtgacagcgtatcgatggcggtcgaaacccctgtcggcagatgaagtggcggaatgatgccaaaagacggcggtaaaaatctaaacatagccgcatcgagacggccaagagaacgagggggaatagatatgacaatggcaaaatgggctgaaagacttctggctggaatcgccgtcatcgcgctcggctcttcgctggctgcatgcggaaatgaaagaacacagtctcaggcaactccttcgacctcgcagaaccaatccgcaaccacgactccaccgaaaaagcaggaagaaccaaaacccgaaccggtgcagccaatggcggatttcatcaaagcgtttgactctaacaatgccacgccaatcacggatgcagtcgagttcgatccgcagaaccgtgacagcggatactatcgaacggaataccggctcggcgcattcaatggatccaagggaacccacggcaacgtcggaaacatgaccatagacatcgtcgaatatggatactggggtaaaaacaccaatctgtgcgtctatctcagtggaacacccgacgacgtccgtactgcctatccggcattggcaaaatccgtagacccctcactctcggacagcgatattcaagcggtgctggacaaatcctcttccgggggagatgtgcaaggagaactatcctttgccccgtcaaggcagacagtgcaatccgattatttgatcaaacacatcgatggaagcctggaggcattcatcgatgccgatctcagcaagaccaagcagtagcaagctacattgaaagccaagagaaaagaagaccaaccatgacaatacgcaaacgcaccctctactggatactcgccgcgatattcgcattcaccgccatatacgcgccattcagcgacgacaaggattccagcatactggtcacaatcctgaccatcctcctcttcatcgcgctcgccatactgttcgcgcacctcgcgcgaaaggtcgaccccgagaaggcgatccgattcggcaaggcgaagaccgtggccagagctgcgtccgtcaacgggttgccgcgcgactacacatgcatcgacatcgaaaccaccggactgcccgaccaggatccgcgaatcatcgagctcggcgccgtccgcatccgcaacggtaaggtatccggcacctacagccaactcgtcaaccccggcaaacccatacccgcaaaggtcgcggaactcaccggaatctacgacagcctcgtggcagacagccccaccatcgcccaggcattgccgagcttcgtcgaattctgcggcaccgacaccctcgtcggacacaacatcgaccgattcgacgcgcccatcatccaagccgaggcccaacgcaacaacatccaactccccgatttcaacacgatcgacacgttgccgctcgccgaaaccctctgccccgaactcgaccgccatcgcgtcgtcgacctcatccgggcgttcgacatcggcgacaccgaagatcaccgcgcaacgcaagacgcactgcagacctcgcagatctacgaagaactccgcaggcgagcctcataaccataaacagcaaaacaccccggcgctcataacgagcgaccggggcgtttttgtttttttattcgactttaggtggctgttgccatttggggtcttcggaactggctttgattctgcggcctagttccgccatgagttcatcgtctgacgcatctcttaatgcgtcctggcttttgattgccttgatgtcgtcatctgtgagcaaccccatgatgattaggggctcaatggcgggtctgccatatgcgcgcgcaatggcgacggcatttttttctgagagtcgatcggggagttggcgccatatggatgatgcctgcaccccagcttttttagcgacggcgttatagctctcaccgccagttatcttctcgaaccaatcgttgatactcatacattgcattatgcaataaaagagcattgcggtcaagtctaaatctattgcgttttgatttgacttgcattaccgactgcaatatactcattgcaacaagcaataaacgtatggctttatggaaggtgctgagatggcgtcgcgagttgttttcagggaaggttttctcgaccgagcaaaaaggatgtcggggattaagactgacgagtctttcgctgcagcaattggcatcagcgagagtcgccttgaatcgatgcgaaagggtgcggaagttggtactgacgtgctgtcgggtttattcgatgcgtttggctttaccccaggcgaagtcgtaactatcgctactgatccgcatgtgcgctcgcagaaactggtggcgtgatgacggttgcatatttctgctctggtacacggcaactggtgatcagccagaccgaggattatcgacgcatgttggatctaccgctcgatagtcttccagcaatacccgagaaacgaaataacgaacctcggcatcggtgtttccgtatcccagccgttcgcaggtctcgcgcagatactcccaggcagcgcgtctttcgcggatgtccagcggacgcagtgctggcaatcgatatggcaacgggaagcgtgtggatacgagggaacgatccaaacgggtgggttcctctcgatattccagaactgcatccacagattccaagtcagttccagaggtcggcagaatgatcgccacgaaactctctccggggttcagaagggccacgtcatccacgagatcgtacccgtgctcgaactgcgggccctcgaccataagacggatgtcgcaggccgaatcgcttgtcaccttgaccgcgtgcgcgggcccgtcgccgtcgttcctccattccacgaacaggaacggacggcggaaaccacacgcgacgatcaacggcaccagtcgttcgtcagcatggcggagagtgattctccgttgcgtgaacgaaggcaggctgcgagtatgccacggccaccagatcgtgaccccggtcatggctacagagataacggcagcgccggcggaaatccaagcggagacatcaatcatgacaacaaatctaccccgaaagctggtggcgtgatgtggcgtttatggttcgcgaagcatcatgcgaaaaagatgctcagactgcttgacaagctcgacatggaagccgtttcgacatggtactgcctcagtgagtgtcccagcggaaaagcgcgaaaactacttccttgcaccggccctctccacaaagaaatcgatgatgtcaaggattttgttaccgtgctcgtcgatggtatacgagccgttaggtgagtcgggatcatgcggaacgtaaagatccttgcggacgctatgccgtacgccaagctcgctggtccacatcacgtacacggacagtttgtggatatcgctttcgtggggaagtcggaactcgtgctcgtagacgccgaactcgggcacgtcgctcaacttcaattcgctcagggatataccatcccacctgaacaggatgatgcaatcatgcgcgaggcatggggcgtcgttgacgacatgaacgcaccatctctcggtgtcgtacgtaattatccaatggtattcgacttgatcggatgccgtttgcaacgccttgttgctgatctcgttcgcggttttgcttacttcgttcgcgtccttcgcgagcttgttcgtgttatgcgtctggatccagccgacgattccactgactacgccaccgcaaacagccgcagaaagagaagccaaggcaagcaggtccgccggggcgaggccattgacccaatttatgaattcattccacagtcccattcgattcttcccttcgccggagtgtttggtgagttggcgctttccaatctaacccggcgaagggataccccaaaccataaggaggcgtgatggtcgacatcatccaatccgcggcgatagcggcgctcggcgccgcggtcatcatcctcaccgccaccctcaaatacgcgttcgacgtcatccgcacctatctcgacgccagcagtgagcagaacagggcaatcgacggcctgaccagacgaatcaaccgcatgtgcgcctatctcgcacgcatggaacagaaggaaacccacgatgagaaagatcgctgaacgatacccatgcacgctcatgctggcgctcgccgtctgctgcctcgcgtcactcgcgtggctgctgacccatgacgggtgtctgcatccgatcggcaacatgatcgccctggtcgtctacgtggcgtccggcacgctgctcgtgttgcccaaggctgtcgaatggttcgaacggtatctgccggacatgacggagggggagtgatgagcgagacgaagatcctcgagcacgtggccatgatgaccgaactgcgcaaccagggtgtacgcgccgagaccacacaaggggtgcggcgcgacattgcccgtcagctcggggtaaggatccccggcaaccagacaccgctcaacgagcgtgactcctggacgttgccggacgcggcgaaggtgttcggcgtcgactacgaggcgttgcgcatcgccgcgaacctcggtctgctgaccacataccggccgcgcacacgccgtggcaccctcggtcgacgccacgtcacccgagcggaaatgaatcgatacctgtcccaattcgaggaataggcatgtgcgacagaaccatccgcgccacaggcctgatcctcgcgttcgctggcctggctctcctgctggtcggagcgcacgagggcagaggagagccgatgctcggcggcatgtactgcttcaccgtcggcgtgctgctgccatccaccacataccgggaagatccagaccaagaagaccaggaagaaccgaagggagactgatttggccaaagacccaagcatctcgatcatcaggggccgattggccgctgacccggaataccggaccacgggcaacgggataccggtcgtgaacctgcgcatcctgtccagcggctgggagaaggacacggccggcaacccggtcgatgtcacgcccaccagctggcagtgcgaggcatggcgcgaactcgccgaacacatcgtggcatcgctcggcaagggagaccaggtcatggccacggtacgcccacagaccagcaagtacgagaaacgcgacggcggcaccggctggtccacacgctgggtcatcgaagacatcggaccaagcctgcaacgcgccaccaccgccatcacccgcatccaacgagcccaacacgcgacgccgcatccgccgcagtccggcgaatacggcgaatatgcggcaccagccaatgacccatggaccaattaaggagcatcatgaccacgaaatacacgaccgaggaagtcaagcagctctacagcatcgccatcgaccagggatgggacgcgctggaatccaacgaaaagatagcggtcggccgatactgccgcaaacacggcatcaaccgtcccggcctcgaaccccagacggcgccatcgccactgcccgaacaggccaccgagacgccggcaccacaaccagccgaggaaacgcaaagcacgcaaacccagaccgagaccggcaccgaaccgatcacaggcgaacagtatttcaagcatctcggactgggcccggcggagtccgtggaaacggagatcagcaagctcgaaacaccccaaacaggcgacgccaccgcatccgacaccgatctggaactgctgcgcagcgtccggttcatcgaacgctggcccgacgacatcgtgaccacccctgcgcgaaccgccagcaaatggaagcagatcgctcaggcattgcgccgattccccgaccgtccggccatcgtcgccgaaggcaaaagccgtcgccgcgccctcgaactgcgccgccgcctgcgcaacgcgaaattcgtcggcttccagcccaagggctcataccgggtggaaatcgcgcccgaccgccgccacaaggactgctatgtcgtcatcgcacaatatcggggagccgaacaatgaacggcaacgacaacaacggccaaccgctcgacatcatcgtgcagggcacgcccatcaccaagggcagcgtccaaccatggcgaaccaaacacggcaaaacggtcagcgtcgacgcaagactgcaatcctgggaagccgcgatccgcggcacggccgtcagcatgatgaccgccagcggactcaaaccctacgactgcccaatctccatcaccggcgaaatccgagtgccccgaaccgacaagctccacgacctgcccgcatggcagaccgcgaaaacctcaggaggaggcgacctcgacaaactccaacgcgccatcggcgacgcgctccaaaccaccaacagccgataccccggccgaaaccgcgagggagtgatctccaacgacagccgcatcatccactggcagatcagcaaacgctacgccgacgaaacccgccccgaaggcgtctacctgaccatccgacccatcagcacgccggaactgcccgactggcaacccgcaaccccagccgggcgaaccatccacgacaacctgcaacgccgaagccaacacctcgccgacatgctccgcccgcaccacgaccgaaaggacaccaccaagtgagcaaacacaagcaccgccgccaaaccatcgaacaccaacgacagaaagcccgccgcaaacgccgaccccacaccatcaaccaggaaccacaaaactacgagaaccgcgagaaccaatgagcaccatcatcaacaccacaggacacaccaccggcatcactttgaccgacgccgactggaacaccacccacatcgaaaacggagacagcagaataaccatcctcgcccacaccgacgaatacccccaactcgtcgccgacctcgcactccacctcaccaccatcaccccaaaccccggcatccgacaaaccgcccaagcactcgccgaagccatcaaccaaggagcgtgacccgcacgaaatgacccccaccatcaccctcatcgacaccacccgactcaagccgaaccccaacaacccccgcaagaacatcggagacatcaccgcgctcgccgacagcatccgcgcgcacggcatccagcaggagctcgtggtcaccccgatcgccgattcaaccgattacagggtggtcatcggccacaggaggctcgccgcctcccaccaggccggactcgcacaggtaccatgccggatcatggaactctcgcccaaggacgaacgcgagctcatggtcatcgagaacacgcaacgccacgacctgacacccatcgaggaagccgacgcctaccagggactgctcgacctgggcagcagcatcgagaacatggccgaaaagaccggccgcagcaccgacttcgtgcgccgccgcctcaaaatcgcgggaatcccacgcctcacccgagccctcgccaaggacttcaaccaactgtcactgtccgacctggacgtgctcgccgaattccaaggagacgaaaccacccagcaggaactcgcacgccaggccggaaccaacaactgggactggacggtacgcaaagcccgcgaggaacgcaagggaaccgtgtggatgaacaaggcgctcgactacctgcaccgcgccggactcaaaacctgccaagcaccctcgaactggtggaatgacgcgccggaaggctaccaatactcaacctgcatcaccaacatccaaaacaccagcttcgaaaaacaatggcagaagctcatcggcagcaagccgaacatcgacgccatcatcggccttgacgaaaccgaccacagggccatcgtctacgagcgcatccccccaagaccagatcgacaacgccaaccgggcgaaacaagccgaaaaacaacgccgagcctacgcgcgcgaacagacgaagaaggcacgggaactgcacgatgccagccaagccctgcgagccgaatggatccataaaacccagaacacatggaagaaacccatgatgcaacaggccctcctgcacctggtagacggcgaaatcctcggcaacgacgaataccggttccccgcaggctccggcgacatcaactggtcagacaagaccatcgccgcatacaaccgcatgaccacgccactgcccatcaccggcaaagaccccgacaacggcatctggcacataaccacaggcaaaaaccttgacgaactacgccgccgagcccgcacaggcaacacacgccaactccaactcatcctcattctgctcgcacgccgcgaagccgacatcaaccccggggcatggaccaacaaaaaccagctggacagcctgcaacacatcaacgactactaccaagccctcgaactgctcggatacaagcccagcgacgcggaaacacaggcgctcgccggcagtctcatcgaggtcacgaagggaggagacgaccatgacgacgataacgatgccgagtagacgccagacggcacgccaacgctgcaaatgggcggccgcgtgcggcgaactcgacgccatgggaatgctgatcgaccagctggccaccagcgcgggccggttgcgcgaccaaggcgcgcccgaggacgtgctcgaagacctgaccatcacgctcgcccgattgcgtgaaacccgcaaggcagtgtcatcggccagccgacgactgtggacccgagtggaggacatgccatgagacgccaacgactctcgccgaccatgaccgaaacactgatcgccatgctcaaccgcaacgcctaccccgcatacgaaaacaattcgcgcaccttcgccagcctggaggaacgcggactcatacaacccgacatcgagggcaactggagcctgaccgacaccggccaccaaaccgccctcaaactactcaagaggtgacatcacatgggcagatgggtcgaaaacgagaaaaaccgcgtgaaatcccgtcacatggtcgaacaagcaatggactggctcgacgatgccgacgaaggggattcggacggccgaccattgcgctgctggagaagccgcgactacagcgccatgctgttccgcgaccaagccagcggactgctgcgactggccatcacgcgcgtccagctcgacaaatacacgctcgaataccgcgacggcatcagctgggacgcactgcagcagatcaaaaacgagaccatgggcaccgacgtgtgggccgtcgaatgctacccgccgcaacacctcgtgcaaaacgtcgccaacatgcgccacctatggatcctcgaagaaccacccgcattcggctggaagatacccaccggcgaacccgaggacgacgccgacgccaccgaagacgaaccataccggcccgccgcatccacacaacaggtctactactacgagggggaatcatgagctcactgctatacgggcgggcgaaaagaatcaaggtcggcgaccgctccgccaaactcttcctgttgatcctgtgcgactacgcggacgagaacaaccgcgcatggccaagcatcgaccggctcatggccgaaggcgaagccagcgcaagcaccgtgcaacgagccctgcgctacctcgaagaccacgggctcatcacccgggacgaagactacggcacccgctaccgcgcagaccgaagcccctacgtctaccacatcaccctcgacggccacaaccacgtcgaatacaaaaaccgtaaaaacaagcaaaccacgaaaaaacggggtagcaccagtgacaccccgtcagattcacggggtagcacccatgacaccccgcaacccaaccacggggtgtcacccatgacttcacggggtgtcaccggtgaccgtcacggggtgtcacccatgacttcacggggtgtcacccatgacacccaatctcttaaagaaccatcattagaaccaccaagagagagtacgcgcgcacaaaaaacaaaaaccaccatcgaacaaacgttcgactcccgcaaacaggcactcgccctctaccagccgacaccagacctcaccgcgctcgccgccggctacggactcgaccccgactgggagctcgaaaaattcaaggacacatgccgcgccaacggaaaaatcccctacgacctcgacgccgcatggcgcaactggctcaaacgcggccgcgaactcaacatcggcaccccgaccgaaaccacgaccacacccaccgaccaagccacggaactcgaacgccgagcccgcaaagtcctcgccaccagcaccccgctcaaaacccgccaacccgacgacggcgagcgcctgcgctggctgccacacgtcacccgtctgctcgcccaaggcaccgacgcggctcgcatcgtggaactcctgtgccaggccatcgaccggggcgaactggacgaggccgcatgatgggcagcgtgcaagccaccatcgactggcgaaccgccacgccggaagagctcgacggccaccggtgcatcatcaccaccgtggacggcacgatcatcgacggatacctcaaagccatcccgcccttcacccccgaataccagctcacccggttcgtgctccacgaccgagacctctgcctcggacaattgcgcatcctgtcccttaaccccaaacacggcaccgcgatactccaaccacacatccgcagcctgaccgtcacccgacaaaccaaacaaccaaccaacgaaaggaatccgcaatgaacaacgcggacatcaccagcctcatccaccaggcactcgccgccgactgccagatcaccatcaccctcacgcccaagaactacatcaccgacgaccaggcggaaacggaggataagcagtgaaccagcgaattacattagccaaacgcattctcgcactggccgccatcatgttttgcatcaccgcgctcgcaggctgcgagtgcactcccatcgactcgtcggccgacaagcacactgaagcggtcacgcagagcgaatgctccacctacaacgcccagtgggagacctgcacgatcaccatgccggacagccgacgcgtgacctgcatcgcacacgacagcaacgccggcatctcctgcgactgggcgcacgccgacggagccgacaaaggatggacggaatgagcgtcaaacagtccatcgaaatcgaaaccaaaaaccacaccacgctcatgatggggggtcacgccagcaggacaattcaaagtccgcttcgaccactcgatagaacatgaaatcgattggtatgacgtacaggaactcaacaagttcctcacacaagtcctcgaccgagacataccggaggaaccccaatggcaatcctgaaacacacatacaaagtcgccatcacccgcaccaacatcggatacgacatcgtcatcaacgaattcgccaccgacggcacccaccgcgaatacgaacgacgacaccactcatgggccctaaccagccccggagccgaccgcgcggcccaacgactcatcagccgcatcaaacgacaaaaccagcgagacgaacacccacgcgaatacaccatcgaataggacactgatgaacaacaagccaaaccgattcaacgacatcctcaccaacatcgtcaccggcgtcaccatcaccgcatggggaacagccgtcatcctcctgctcatcaaactcgccatatgggtattccaataacccgcaagacgacaccaggcatgagacaatggacacgggcctgatgccaaccacacgcaaccaacacaccaccaagaccagaggggcatcatggcatcaaccaccaccgccaaacgattccaccacgacctgcgctcgctggcggacggttacggggtgctgtgcctgatcgccgaacgcaaggccagcgtgatggcccgccactccggccacggcacgaggagcgtggcgccgatcccgttgaatctgggcgcatggcaactcagacaggacatcgaccggctcgtcgaatcactggccacggccatcggcctgcgctaccggcacatggacacggtctcactgctcaagggcatcatgcgctacgagccacgactcctgaaccggcccgacatgcccgccatcgtggaactgacccgacaggccgccatcaggctcgaccgcacactcaacccgccaccggaaaccaaaatgatcggctggtgcccagcctgcgggttcgaactgcgctgcgacgaactcgaactcaaatccgggtacaaggcatgcgacagatgctccggagaataccgcatcaaagacatccaacgcgccagcatgctcagactcgcagtcggagaatcacgaggaacagcagccgaaatcagccgcctactacaaccatggggcatcgatatcaagagcaacacaatctcacattggggcgctcgcgggctcatccagccggtgggaatggacggcgagcgcccggtgttcctggtgtgggatgtgtggcaagcgcatgtgcgcaaggatgggtgatcggtgaatctgttcacgggatttgacaaatgcgaactgtccacgtatacatgtctatagttggtcatttccatgagatcatggaggtggcctttcgtatatctcctcgaaattcttcagggtcggcgcatgagttccaaccgtacgcataaccgggctttcgagaaagccaagcaggcgttcttcgaggaaggcaagcgcctggactccgagggaagctccgccgccgattgctggatctgccacaagcgcatcgactacagcgtgccgcccggcaccacggacgcgagccatgagctcgaccattattacccggtgcgcgactatccagacctgcaggacgatcccgcaggcttccgccactcacaccgcaaatgcaaccgcgagcgcggcgccggccagcccaaactcggtttgggtgacgtgatccccgcctggtggtgattgggctattcacacgaaaggactggcgtcatggacaatgaccacagcatctgccaacgattggccatgatgctcgatgaggatccgtcatgcacgatactgatcatcggccgatacatggcaccggtgcgcgccgaatacaacagcgtccggcatctcgtgcgcaaggccaagctccgtccaacgatcgccaatgccgggcatctgagatcggtgaccgcgcagcaaggcaggcttgaagctttcgcgcccatcggtccggcccgtggccgtcgtgcccgcgccgtgctgtatgtcggcgagcgcaatgagcacatcgacatggtgctcgactcgttccgcatgtccggagcgatcgtttacacgtcgttgggtgtgtgattgcctcgccgatggggtaggggagtgcggatttgcagaccgatgtcggtaggcccaccctcccgcgcgcaccagacctccctctccggacctggccaccctatcgcgcgcgagggctcggaatcggctttattccgccgtttcttaggggcgtatttttactggtcttttccggttgttttccggtggctcggtttgtttggttggtgattgggttgtttttgccgccagttcggctgattgggggttgattatgagtgcttccaaggatcagcgggctcttgacatgttcatgggcgccgaaccgttgcagaagattcgtgacgagcttggtttcaagaccgtcacgtcggccgaggcggcgatacgccgtgccttggccgagaagcgcaagggcaaggactacgacaccgaacgccagctcgagctggaacgcatcgacgccatgttcaggatcaaataccccttggccaagcagggtgattccgcggccatgagcacgtgcctgtccctgagcgagaaacgcatgcgcctattggacaagcctggcgatcatgagggcatcaccgccagctatgaggcgacgctcaaggcgctggccatcaccgacgcggattccgctttggtagcgaccggacgggcggtggcccggcagatcgactacgcgctgcgccacggccaggggcaggaggtcaccaaggccctgtatctggtgcctcacctgatgaacgtgctgcgagagctcggcgcgacgcccgcggcgaggaaacagctcaaggagtacgccggcgccgcagcggccgaatcggacggcgagccggtggacgagctcacggcgttccgtcgccgcaagtttggcacctgaccctaggaggattggagagcggccatgagcagacactatggccgcaccgaaccgagactctggaccaaaccattgcgcgagctcaccccggaaaccagcctcggatacgaagtcatcgacttcgcccgccagatcctacacatcgaactctacccatggcagcaatggctcctgatccatgcgctcgaactcctcgaagacggcatcacctatcgatatcggcgaatcatcgtgctcgtcggacgacagaacggcaaaaccctcgtggccagcgtgctcgccgcatggtggctccacgtcgacagccaacgccaccccgaccgagtaccacccctcagattcaagatcgtcggcaccgcccagaacctcgacatcgcccgcgaaccatggaacagcgtcaaactctggtgcgaccccgaacccgaaaccatcgaggaacaatccatcgccatccccacactgcaggccgcaaccgccaaagtgagcgacacgaacggcaaggaatacatcaaaagccgagcgctcgcagtctacgagatcagggccgcgaagaacgcgcgaggcaagccagccgcccgcgtcatcatggacgagctgcgcgaacaaaaggactgggccgcatggaacgcgctaagcccgaccatgaaaagcttctggaacggccaactctgggggatcagcaacgccggcgacagcaccagcgtggtcctcatccaacagcgtgacgcggccatcgaattcatcgacgcctggcaccgcaccgtcgaatcaggactcatggacgccgccgaatacgcaggccgccacgactgctccctcgccctgttcgaatggagcgccgaacccgactgtccaaaggacgacgtggaggcgatactccaatccaacccgtccatcggctacggatcccagacagtggaaggcgtgctcgccgacatccccggcatgaccgacgccggctaccggaccgaagacctctgccaatgggtcaccgcgaaggtcgaaggctacatcgatgtcaacgattggacgaacaccttggccaaaccattcgacatccgaatccccaccggtgcacgcaccgtgtggggaatcgacgtgagcgtggaccgctcgcacagctggatcgccgccgccgtgctcgacgccaacggcaacccggtggtcagcctgcgcgaacgacgcaaaggcctgatgtgggtgcccgaatacatgcagcatctggccaaggaatccggcatgtgggaggtcgccatccaatccaaaggctgccccgccatggaattcatcgaccccctgaagcagctcggcttcaccgtccacgaaatcgacggcagccacatcggcctcgcgaccggacgcctgcgagaccgcgtgcgcgaacaccggctcatccacgctccacagccactcgtggaccaggccatcgaaggcggcgtgaccaaggtcatcgccgaaaacgaggcatgggaccgccgccggtcgatcgtcgacatcagcggcgtcgccgccatcaccgtagccctctacgggctcgaaacctgcgaaccggtcgaaccggaacacagcgcatacgaggaatacgacctcctcaccttctgacgaaaggaaccagcatgctttcacgccacccgttgcgcaggtccatcggacgacgcatcgtcgcccgcatcgacaccgtcacctggcgaggccggctcgccgcatactcatgcggatggctggaactcaaggacgccagcgtagtggatccgatcaccggcgccaccggcgccgacggcctgatcctcctgcccgaaacacgcatcgacttcatccaaatcgcaccggaggccgactgatggcgggactctacttcgagcacaacgggctgctcaacgactggacggccgccaacaatatcgaagtcgtcgacgccggccagccactcatctcctacgacgcggaacccgacgggcacggcgtgaaaagccacccattgcgcgaggtcaccgacttcatcgcacgcatgatcagcagcctgcccctcaaggtctacaaacgcgaacccgacggcggacgcagccgcgtcagggaaggccccctggccatgctcgtcgccaacccgagcggcaaccccgccataccacccagcatgttctggtacgcgctcatccaggacggcctcttggccgaccggtacctcgccatcatcgaccagaccgccaacggcctgcgactgaaacgcatccccgcccgccgctggaggcccactgtcgacgacttcgacgaacccaccggcgccaaggtatggatcgaccccgcgaaccccgcccggttcgacatccacacggacggcatcatcatgaacgtcggctatgcgttcgccagcggcaaaggcgaacccaaacgccgacgcctgcgggaaatcctcgaggaatacgacgcgagcctgaaataccgcgccgaagtcaaccggcacggcatccgaagcccgctcgtcatcgaacgcgacaagccatggcccgatgccacctcccgcgaacgcttccaacgcggcatgaagcaattcaccaacgggcaaagcggggccggcggcggcatgctcttggacgacggcatgcatgccaccgccctcaacgggttcaaacccatcgacgtggacgacctcaatgcccgcgacaaggtcaagatcgacgtggccaacgcctacggcatcccacccgagatcatcggcatcagggaaggcaacttcagcaacctcaccgctttcaagcagatgctctacggcacctacctggacccgtacatcgtcagcctcgagcagaccctgaacctgtgcctgcgcgaccgactgcagatctacgacaagggcgtatacctcgaattcgaccgcgacgcccaactgcgcggcgatcccgaagcccaatacaaggcgctcgtcaccgccacgggccgacccatattcaccaccaacgaggcacgcgaactcctcaacaagaccaagctcgacgagggcgaaggcctcgtcaccccgctcaacgtgctcatcggcggccagaccagccccaacgacgggcaaaccgaaagcaggggcgacgcccaactgcccgataacgcagaggaaggtgacggctcatgatccacgtggtagtaggcccgccagcagcgggcaaatccacctacgtggacgatcatgcgaccgaaaacgaggtgaaggtcgatttcgaccggatcgcccaggcgttcggcagcggcatcccgcacggatccgtcgaaccgttccgcacggtcgcgttcgccgcaaggtcggcggccatccgccggatcctcgatgagaatatcgacgcgtggatcatccatagccgcccttccgcggaacaggtcgaagcatacgagcgggccgatgccgaattcatcctcgtcgaccccggcatcgaccaatgcctcgaacaggccgccgacgacgatcggccggaaggcacagagcaggccattcgcgactggtacgacgatccaccgagcctgtcatccgagaaaaaccagcacacgcagcataaggagaaccgcatgatgctcaccaaaaccatacgcacgccggtcaaggcccgtaccaacgaggaaggcgaaacgaccgggttcgccgggtacgccgccgtgttcggcaacatcgacctcggcggcgacaagatcgtcaagggcgcgttcgcccagaccctcgccagccgatacccggatcatggcgccggaatccccgtctactggaaccacgacaccgacgacccgttcaagaacctcggcctgaccaccagcgccatcgaggacgagcacgggctcaaggtcgaaggtgacatcgacaccggcaccgagctcggcaaacaggtcgccaaactcctcaaggagaaccgcgtcagccagatgagcttcgcgttcgacatcgaggacggcgcatgggtcgacagccggaaaaacgacgacggcaccatcagccccggctactacgagctgcgccggctcgacctgtacgaggtctccatctgcccgatcggcatgaaccaggcaaccgaggtcagcgccaagaaagccgtcctcggcctcgaccccgaccagcagccggaacacgacgagaaaaccaccgacacggatcccgccccgcgcaaaaccgacgccgcacgccgcctgcgcctcctcaacctccaataaaccaaccacaccctccgaaaggaacacccataatgcatctccagcagcagatcaacgacctcaagaaagccgcgcgggcaatcctcgccaacgccgacaacgagcaccgcgacctcaccgccgcggaaaagaaggaattcgacgacacctgcaccaaggccgaaaccctccagcaggtacttgtcaacgccgaagccaacaccaaacgactcgacggcatccttaccggcgacgccaagagcctcggcgaagccgaaaagagcgaagacaatctcgaaggccgcgacctcggccagcgattcgtcagcggcctcgcctacaaggcctggcacaagaccgccgacacgctcggcaccggcggcgccatccacatcgacaagacccgcatcggcaccatggacgaatacttccaggccaaggccggcaacgccatcggcacgcccatcgcccacctgcagcccacgcgcatgccagcggtcgacctggtcaaccgtcccgccatcaccctgctcgacctcatcagccgaggcagcaccaaaggcgacttcgaatacctgcagatcctgagcgtcacccgcaacaccggaatcatccccgaaaacaccggcgacgacgccaccgacacgcagaagccccagtccacgttctccaccgcgctcgccgacgcgaaggtctacggctacgcggacggctacaccgtcaccaaccagctgctcgaagacgactccgccatggccagcttcctgcagaacgaattcgactacagcttccagctcaagctcgccgacatgctcctcaacggcaccggcaccaacggcaagcccaagggcctgctcaacaccaccggcgtgcaggcggggaactggaccaaggccggcgacgaggcgcgcaacctcgtggtcgccatccgccagtccctgaccaagctgcgcgccgtaggcgccaccgcgtccgcgatcctcgtcaaccccgaagacgccgagaagatcgacctgatgaccgacgtcaacaagcgattcatgggcaacggccccttcggcaccggacccaccaccgtatggggacgcccgctcgtcgaatgcgaccagatcgaagccggcaaggccatcgtcggagacttccgccagatggcattgctcgaccgcagcggcctgaccgtcgaggcattcaaccagcacaaggactacgccagccgcaacctcacctacgtgcgcgccgaactgcgcgccgcacaggtcatctggcgacctgccaacttcgtcgtgctggaggccaagtgatgagcagccaaatcgcaatgcgggtcatcaacggtatccgataccgccccgaagacgcgccacgccacgcggccaccgaacctcccgcaatcgaggtccctgtggaaaccccgcaacccgagcccgaatccgaaaccatcgaaccggtggcgggcgtactcaccgcagacgaggccaaggccaacgccaaagccacgaaggccaccaaaaaggaggcctgaatgacagcggcacaattccgcacagtccaacagccactcgacccgaccaccgcagtcggcgaaatcgccctgttcgacgcggacggcaaacccctcgacctctcaggtggaggccagaaaatcaccagcgtcaaagccaccgcgctcgccgccggcacggctcccaccgcgacactcgccaatggggtgttgactatcggcattccggcaggagccaaaggcgctccaggtacggccggagtcggcgtgaaatccatcagcctgaccaaggacaccgacggcaacatcactggcggcaccttgaccaagaccgacaactccaccacggccatcaccgtgaccacggcctgattcggaaggagcgtccaccatgccaatcccagacatcgtagtggacaacccgacagtcgatgcccaatggtggatcaaggccgcgcaaggctccatccgccgctactgcggctggcacgtcacccccgaaatcgatgacacgctcaaagtcgacgcctatggcggcagcatcctcacgttgcccaccaaacacgtcaactccatcacgaacgtcctcgtggacgggcgcgagctctccgatcagattgattggagcgtggccggtacgatccagctgaggtcgggctcgtggccagaccgcccaggtagcgtcaccgtgaagctcaaccacgggtatccgcgcgacgaggtgccggaaatcgccgaactgctgcgcaccctcgccaagagggcgcgcagccagccaggcatctccagccaatcagtcaacggggcatccgtcagctatctcacctatgggggcaccacgctcggcgtgcagctcctgcaaatcgagaaggacatgctcgaaccctaccgactgaactgggggccacgatgaatttcgaagacagtgtgctcggcatggagaccggtctcggcatgagcagcctcactccgatgattcggcaacgtgccaaaccggtcatcggcgacggcaacctcgtctacgacgaggactggtcggatcccgaaatcctccgattcgaggggtatctgtacagccggtccagcgtagactccgcagccagcgagccacgtgaccagggcactgtcagtgacaagcagctcatcgtgccgaatcatgccatcgacatcaaggtccatgaccgcatcatcatcaacggcgacacctggcgggtgaccggaatgccggccgccgaccagaacccgttcaccggttggcggccgacactggtcgccgacctcgaacaagtgacaggaggcggctgatggccaagatgggcgacaccgacatgcacttcaaccaggcgtacttcgacacgatcctcaaggaacccggcgtcgacgggatgtgcgaggagaaggcgaaacaggccctgcagatcgccgtcgctaccgcgcccgtggtcaccggcaactaccgggacagcctgtatgtggagcccgtcgaattcaggaaccgcaacgcatggcaggtggtcagcagcgaggaggactacgcgatggccgtcgaagccaagcaccacacgctcgccaacgcgatgaggcaggtgaaatgacgaccatcgtactgcccgccgacctcaaacgctgggccgtggaatacctggcgggccggctcggcaggctcggccgtgacgtggacatcggcaccaaaaccccgaagaccatgccctacccgctcgccaggccgctcatcacggtcgacgagctcacgcccacgaaatacgacctcgtgcaatgggaccaggaactcgccgtcaacatccgcgccggaacccgtcagaacgaccgggagtgcgacgacctcgcgcgcctgatcgccgcgctcctcaccgatccgacgatcagccaggccgcggcaagccccatcaccagcgtggaggcgtgcagcggcccctatccgatcgccgacacggccgacgtggcccactcgtatctcaccgtcgaataccactgcatgggcgagatgcgcgaaacagaataaccggattttttggaaaggaaatcatcatgacagcagacgtcgagggcaacgaccttaccaaggtcttcgtgcccatcaccggcttcctcgccgtgcagctcaccggcgaagccaaatgggtggaacccgcggcaggcgcggccacaccgctcgtgctccccgcaggctacgtcaaggtcggcctgttcaaacaggacggaggcccgcaggacggcggcgacaaggaagacgacatcgaattcttccaggaaggatacaagctcggaggatccaagagccgcaccctgcaggtcacactcgccgaattcaacgacgtcgtccgccagctcaccaccggcaagaccccggatgccaacggcatgatcaccgtcgatggcgacaatgacagcaccttccccatgttcgaggtgctgaagggcaagaacggcatgagcctgcgccgcaacggactcggccgcatccagaccgtcgaacccgaccagagcacacgaggcgaggccggcggcaacgccgtcaccttcgactggatccgcaacgacgaatggggcggattctaccgcgaatggctcgtcgccccaaaaccctgacgtcggtgacggtcacctccgaaaccggaggaacgctgccgacgaacctcaaagccggagccacgctcaagctcggcgccaaagccacctacacggacggcaccagcagcatggccacaagccaggcgaccttcacgtcactggacacggccatcgccacggtcaacggcaacacgctcaccctcatcaaggagggcaccgccaaagtcaccgcaaccatcggcgccaagaccagcggcacgacgaccatacccgtggccgcagccgcctaaccaaatcgtctcccgcaacgcagtcgggtcgctgcgggagacccccaccaacccgacaaacccatgcagtccccacgatcatcgaaaggcacccgaccatgaccaccaacaccatccccgacatcgacttcgacgactggaccagcgaacaggaagaagccgcactcaaacagctcgcccaggccgcgaaatgcaaatacgccatcggcgacaaccacttctacggcaaattccccgacggcaccatcatcagcatgccactgaacctcagcctcgacgacgtcaacgacatcaccgaaggcgacgtatccagcgtcgaccagttcacccgcctcatcgaaaaaatcgccggcaaggacgacgcaaagaaattcctcgcccaacccacaccatccatgatcgacatggccaacaaatacttcgaaaccttccaaaaactcaaccagctcgtcctggaaaaataacagccctcgcccgcctccaccatgagcaccggcaagcgttcacagccacattccgcgaacgctacaacatcagcgccaaccagatcggcaccgccatcgcctacagggaagcctgggacctcaccggccaactcctcgacgaccccggcaaccccctgtgcgccgaactcgccgactgggcataccccgcacgactcatcgacctgctccaactcgccgccaccataggcgacggcaaagcagccgaaaacatcatgccatggaccatgcaacgccaccgcaaccagatcgaagccgcgaaaaccacaccggacgagatcaacaaggcgctcgcggagctggacgaggaaatcatcatccccaccaccatcgaggacataaccgaatagagggagaccaccatggcgaagatcgtcggcaccggagccgtccgcgtattccccgtcatgaccggattcaaaaaaaccgtcaaaaacgaaatggcgggctccggacgcgaaggagccaaaggcttcgccgactccctcaaaggcgccggcacgaaagccggcaaacaactcggcaaggaactcggcaccaccgccaaggacgccatgaaaaacgtcggaggcgaccaggtcaaacaactctccaaagacgtcgcctccgcctccgccgcggtctccaaagcgaggatcaagcagcagaccaccaccgcagcagccatccaagccgaaaacgcatacgcgaacgcggtcaaacagcacggcgccgacagcgcacaggcagccgccgcatcacaacgactcgcagcggcacgcgaacgcgtcaaactcgccgacgtcgaactcgccgcagccaccggcaacctcaaatccgcccaggaaaccctctccaccgttcagaaggacgcggaaacacaagccaaagcgctcgccatcgcgaaccagagcatgttcgcgcgattcaagatgggattccgggatctcgacgcgggcaaggacaacgccaccggattggccggagcgttcggcagccttgccggcgcgatcggcggcccgatcaccagcgggttgagcaagttccgcgccggatgggtcaacgccgacatggccatgctcgacggcgcgggcgtcatgggcaggatcggtggtgcggtccataagctgaccggcaccatcaccggaacggtcggcaaatggggcggcatgatcgccgctccgttcaagaacggcgccgccatcgccaaacagctcggcactgacttctcctacggtctcaaccagcggttcgcgcccgccaaggccgccatcggcaagttcgccggcaccatcgccacaccgttcaaggcggttggcggcgcaatcggcggatacctcgcccccgtgggcagcgcggtcggcaacgtgttcggcaaaatcgcccccatggcgtcgagcgccgccaacggcatcaaaggcgcgttcagcgcggtcgacaccgacatcaaggcgaaactgtcgagcgtgggcgactccgtcaagggcttggccacgctcagcgtcggcggcctggccgcaggcgtgggggcgctcggcaccgcactgatcggggtgggcaaaagcgccgtcggcgcgtatgccagctacgagcaggcggtcggcggcatcgacaccctgttcaaggattcatccaagaccgtgcaggcgtatgccgccgacgcgtacaagaacgccggcgtatccgcgaacgactacatggcgcagatcaccagcttcagcgcctcgctgatcagctcgctgggcggcgacaccgccaaggccgccgaactcggcaacaccgccatggtcgacatgtcggataacgccaacaagatgggcaccgacctcggcagcatccagcagacctaccagagtctggcgcgtggcaactaccagatgctcgacaacctcaaactggggtacggcggcaccaaaaccgagatggaacgcctcatctcggacgccaacaagctgcgcgaggccaacggccaagccggcgacctgagcatcgacaaattcagcgacgtcgtgcaggccatccatgaggtccagagcaacctcggcatcaccggcaccaccgccaaggaagcctccaccaccatcgaaggctccgtcggcagcatgaaggcggcctggcagaactggctcaccgaactcggcaagaacgacgccgacatgggcaagctcaccaaccagctcgtcaccagcatcggcaccgtcatcaagaacatcggcccccgcatcggcgtcatcgtcaaaagcctgatcgcctccctgcccagcatgctcggcgaaatcaccaaaatcctgcccgaacccatccaacaggccatcggcaagatcaccggactggcaagccagttcaaaaccgtactcgccccaatcggcgcggcattcctcgcactgggagccggcggcatcgcaccactattatccaagatcccgttgctcggcggactgctcggcggcttgagcggaccactggccatgctcggcggcccactcggcatactgaccgcaggcctcggcgcactcatcgccaccagcccacaactgcaatcggtattccaagtgaccctcaacccgctgctcgaacagttcaagaccatccttgacgggttgaaaccaacattcgaccagatgaccaccgcgatcggcggcatgatccaacaaatcatgcccgccgtcaccggattcgtcgcggcactgatccccgtcatcggccaggtcatcgcaaccctcatgccgatcatcccgaccgtactcacaccgatcatgaacgccgtcacccagatggcaccagtggtcggcggcatcatcaccacgatcatcggatttatccaagcgaccctgctacccgccgtccaagcgaccctcccgtacatcaccggcgtcatcaactcgattggcaccgtcgtacaaggcctcgtcaacatcatcagcggcgtcatcaacatgatcgccggaatcctcaacggcaactggacacaagtctgggaaggcttcaaacaagtcgtctccggcgccgtccaagccctcggcggcatcgtctccggcatcaaggacatcatcctcggagcgctcgccggtgcgggcacttggctgttgaatgcgggcaaggccatcatccagggactgatcgacggcatcatgtcgatgatcgacgccgcgggtgattcgatcggatgggtgatggacaagatcagctcgttcatcccgcattcgccggccaaacgcggcccgttcagcggacgcggatggaccacctattccggccaggccatcgtggaaggactcgcccagggtgtcacggacaacgcgggcaaggccgaacaggcgatccagaccgccatgcagcgtgcccaggccgccgccaacggcgtggaactcgcctaccggagcgtcaaacccgcaaccgtcaccaacccaaccggtacgacaccgaacactgccggccagcggacgagggaggggaacacggtgaacgtgtccattgacgcgcacggcatgaacagcgcggatatattcaacgaattcgacctgcgcaccaaggccgcggcaagcggctggggaggagagtagcagtgacccgaatcaccatcgtcaccgataccgacaccatcacgctgcgcgacgactaccggtggaaacaccacatccatgccatcaagaagaacggcatcaccggcctgttcggcacccccggcatgaaggaatccaccacatcgatcccgcaacaggacggcgactactggcccagccgcatcacccagaaaccacgctcgataagcctcgactgcgtcatcagaggcctatcgagcgccgaagccgcacaggaacgcgaccgcatcaacgccctgttcggccagaccctgaccatcatcgaggaaaccgccgccggcccacgccaactcaccggcatgctcgccgcagaccccgaacccaccatgcgatggaaggaacagggcttcgaattcggcctggtcatcacctgccccgacccgttgaaatacgggcagccggtcacctacacggcctccggcggcgtgatccgctgtcagaaccccggcacggcggccacatggccgagcatgagaatatcggggcatgcgacctcgctggcattgtcgtatgcggggcatcgcgtgcaatggcagggcgacgcgcaggatctggcattggatttccgggacatgatacccagcgccggcaccgtcacctatgacgacgcattccaaataccgccgggcggtgccaccgtgtcggttgccgtcgcgggcgggggagcggcgtcgatgaccatacgaccggcatggaggtgatttcatggcatcacggcttgccccgttgacggtgcatgtgtacgagccggtcaccggccggcatctctaccggctgccctacacggccgccgattggacggaatcgttgaaccagcccggatccatgaacgtgaccgtcgactacacgcggaccgccgccagactcggactgttcgaatccctgcgctgttggaaggtgctgatcgcgttgcagcgcgccgccaatggcggtttcgaggtcatgcatgcgggtccgttgacggactgggagtgggatgcggagaaccggagcctgaagctcacggtgggaggcggcctgaccctgctgaccaagcgactcgtcatcaaccacgcgttgaaggattcatggcgcgacgggagcatgctcctcgacgagaaacatcccgccggggacatggacctcaccctcaaaggcagctatgcggacatcgcgcgcggtttgacggccgaggccatgcaatggggcggcctgcccatcagcctgccggcaacgacaggcggcgacaagacccgcacctactacgcatgggatctggccacctgcgccgaccggatcctcgacctgacaagcctcgaacacggcatcgaggtcaggttcgacccgcgcatcaaacccgacgggagtctcatattcgacctgcatgccggaaacgagctcatcgactccacgcaccggtggaacgcggtgatacccggccagcgcgtcatcctctcctcggtggccggggccggcggggccatgacctcgcaggcatggctcaccggaggcaaggacggcgacaagaccctcatgtgccggcgcaccaccgaccggctcaccggccagggttacctgttctgccagtccgcggacaccacgcacaccaccgtcagcgacctgagaacattgcaggcgcacgcgttgggagacctcgcacaaggcgcgttcccggccgagacctacaagatcaaggtcggcgaagagcacagggtgcgcgtcggcgaccatgccgacctgcgcgtcgaggacgaccacctcggctcccggcagctccgattgaagatcaccgacctgagcggctccacggacagcgactggctcaccctgcaggcccaggaaaggaacgagacgtgaacggcatcaaccagacctgcgccataccggcgggaacgcacgccgtatggtgcggcgacagcgtcaccctaggcaccggggccagcacgaccacgaaacgatacagcacgcgggccagcggcgaactgaacctgaccgaacacaactacgccaaaaccaacgccggctatctcatcgacgacaacaccatcggcatgcagctcgacgcggccaaaaccgacaccggatacccgcataaccaggtcggctacgtgttcctgatgaccggcctgaccgactcctaccagtcgctggccaacatgcagcaggcagtctcggacacaatcggcaaggccaggagcatattcacctctgcgcgcatcgtcgtgggcgtcggccccggatgcatccccgacgccgaccccgccgaggcgatcgcgaaacagggtcatatcctcaccgcgatcaccatggccgcagtcgcggccgacgcgctcgtcatccgcaacatgcgcgccatctgcggatccgaccccgacatgcacgccgccggcatcaaccccaacgacgaaggaatgaggctcctcgcccaagccgtcgtcacgagcgtcgacgccgacaagggcgaacccctggatacaccggtcaccgaactgacccgcgtatacacatcgcccggagccgactgggcctcccgccaggtcaacgcgcaacgcaaacgcgaggcatcgaagaaagaggcgaaccggcccaccggcaccgaactgacccaactgacctcgaaactcgacgaactcacccaggcacagggcctgcagcaggtcatcatcgagcaacagcaggctcagctcgaagtccaacaggagcagctcaaggccgcccaggatcggttgaagagccagcagactgcgctcgaggcgcagcagaagcagctcggccagatcgtcgaccagctcaagggcatcgtggacgaccagggcagcacggtcatccagttgaagaccatcacggacaacctcgcggccacggacggacgtgtcgaccagatccagcacacgctctacagcaaccaggtctggctgaaaaaccagctcgacaatctgaacaggcgcgtgaccgcattggagaacaagggcacggtgaccggatgatgaggggaggaatcgtatgaacggcgtgtacggcaaacgcgtgaaacagctcgacgttcgcctcgtcagaggtgacagcgagcgtttgggtggccgttggcggcagcggaacctcgtgaccgacgaggtcacgggaaaggatctgaccggctggagcgggcgcgtcgaattgcgcagtccggacggcgtggagctgtggtattcgaaatcctgcgacgaggtgacggatgacgggtacgcggtggcgaacctgcctccctcggcgttcgacggcgatatctggctgcagcgccggtccggccaatggaagtgcgtggtcacgtcgccggatggcggcacggtgcgcacggtcggctggggctgttggatattgagcgattgattaggaatggagtggttatgagcgagcagatcgtggatctggtggagggcgtgtatcccgcgtcctcggacgtgctggcggtggccgccggtgcgggcggcacggcgggccgtgagacgggcaggattgccgcgttggacgtgctgtccggcgtgaacgccggtttgcgcacggagacggatgcccggatggcgtcggacagggagctggcggccaggctcgaccagctgaccgcgaccccgccctcggacgcgtctgccgagatcaaggatgcgagggtggacgtccagggcgtcgcgcacgcgtcgatgggagacgcgatccgcgtccaggtcaggcgcaacgccgagtcgacggggcagatgacgtggacgagcctgcagggcgattgggcgagcgtgtggctgctggagtccatcacggtgcatccggggcacacggtgcccgcgaccctgaggggggtcacggtcgcgaacttccgcgatcatgtggccgtgtcggcgaacaacgcgacgatatccgacccgatccgcgtgcgcatgagcaacgggcagctgcggcacgcgaacctgacgctcgacggcgacaaggacgtggacggtgtctcctacctggcgttcgaccgggacggcaacgcattgcgcacccaccggtacggcgagttcaccgcgaaccacgggttccagccggacgagtactgggcggcgatgctcgaatacccgtccgaccccgatttcaaggccaaacggtggcgtttcgagccgcggcgcgtcccgtggctcaacccggggggcatgagcgtgccgaccgtcatcgacccgaccctgttcaaactcacgcgacggcatgtgttcgagggtatgaacgtgaacaagggcatggtcctggacggcagggcgcacacgctgccggactggaaattgcacctgaccgcggggatgggcagcatggccgacccgctgcgcatccgctacgagggcggccagcccatctacccgagcctgcatatcgagggcctgtccgcggataaagaaggcgtgatctactacgcgtacgaccgttccggccgctacctgcgcgccgtggccccaaggacatggcaggccgccggcggcacgtggggcgacgacgaatactgggccgcactggtccagtatccgaacctgccggaacgcgtatggaccctgggcgaggtgagcgtcgactggctgaacgcgtccgcgacggccactgagtatacggtcggcaccaacggcgactggccgaccctgaccgcatgcttcaccgcactgcagaacgatgcaagcgagaagaccatcctgatccagcccggcgaatacgacatcttcgccgaactcggcggcaaggcgaaatgggccggatacgcgggcaccgacaattggcgtgacgtgcagcccgtcgttcccgcgaacaccacggtgcgcggcgtcggccgcgtcgtcctgcgcatgacccccaaggatgacgagatcagcgcgagggccgcgaccctgctcagccccctgaacgtcagtggttcgtgcacgatcgagaacctcgacatcatcgccgccaactgccggtacgcgatccacgacgaagccagcagcaaaagcgaatacgcgggcagcgtccacacgtaccgcgacgtgcgcgccgtcaagcagacgggcggcaggggctactcgcagaccctggggttcggagaggcccgcaacggcgtctaccggttcgaccattgccggatcgagggctccagcccgttcacgatccacaccaacgtcaaccgggcgggcgacgggaccctcatcgacatcaccgacagcctgttcctcgacctgacgggcaatcccgcgtggataggattgtcgaccagcggcgacaacaaggccgtccagcacgtgaccatcgccaacagcacgctctccggcatccgcctgtacggggagaaccacagttcgatagccaacagctaccaggtcaccctcatcggctgcccgccagccgccgtcacctcggcgaacggcaacccgtatcccgtccgccaatacaacacgatcagaccatgaacagcatcgggggggtgttcctatgtttttgtcaactccttggggagttgacgtgtcgggattccggttggctgtcgtgggcgcgcttcgccctgccggtggcgtccggcgtcctttcccgtgtggcccggttcaggctacgagggctggttcctggtagagggttccgtttttgagcatgctgtagatcacgtcgcagcgccgacgcgcgaggcagatgatggcggcgttgtggtgtttgccctgttcgcgtttgcgcttgtaataggccacggagggcgggtgtttggtggatgcgacgaacgcggtctgccacagcgcgttcttgaggcgtttgttgccccgcctggagggccgttcgcctttgatgctggtgccggattggccggtgacgggcgatatgcccgcgtaggcggccagatgggcggacgatttgaagttggcgatgtcgccgccgatgccgagcaggatgttgcttgcggtcctgacgcctatcccgggcatcgacgccgggaccgtgagaagagggtggtcctccaggagcttctcgacctggcggccgacctcgcgccgccggtccctgatcgtcttgatgtcgtgggcgatggaggggatgatggtctcggccatgagggtgccgggcacggtgacggtctgctcgccgatcgccttgaacatgtcgtcgatgatgcggccggcgcgaagcccgttggacttggcccagtccttcacgtcctcgatcccggcccgtttcacgcccatgggcccgccgtatcgttcgagcagcgcgagcgtcgcgtcgcgcgtgattctctcgcccttgagcgcgcgttcgaacgcggggtgggtctgcagcagcaggctccgcaggcggttgacgtggcgggtggattcgtgggcgaggtcctcgtcgtggccggcgagcagcttcagggcggcgagggtctcgtcatccgggcccgcgtccctgagcgtctcgggcagcttgagcgcggcccacgcgatcacatgcgcgtccctgcggtcggtcttcgcgtccccgggcagcagctgcgcggtcctgcgcatggccgtgccgggaaggtaggcaaccgcgatccccgtgttccgcgccaccgtcaggggcagggagccgatggtgttgggctggtccacgaccagcagcacacggccatgcttggagagcttgcccagcatcgtgcggatggccttctcgtcctgtttcaacagcttgtcgtacagggtgttcccgtcatggtcgagggcgtgcgcgtggtgcgcgctcttgcccacgtccaggccgacccacacgtcgatgtcgtccggggtcatcatcgttcctcccgtcatgaaggttttccggtcgccgcgggctcggaggagtccggacgcccgcgccgcacccacattacgacgagacctgcgccatgcgcccctgaagcgtccgtgtagccggcctggttcctatcagcggtcatcgggcgtccccgttcccggcgacaacacccccggatcatcgacgacagggcaggaaagtcataccggaaccggcgacccggccccgaccatcggggcctaccaaacatggtaatgggcttagcctcctagcctccagtgatcctcgcatcccgacatatccacgttgacggtcctgccccacacgaaacaagccacgccggcagtgagcgccgtcagcactatgaagcacgcgatgccggcacggtgtgcgattgtccatagaccgattcggcagaagacgtttttcttgggtagggcatcatgcttcgcgatgacatccggcgatgaggtttgcgaggcggattccacgatggctgcttcctggtgcttggcatctggctgatccgttttggtattggcggaggctaacagggagcgcaattgtcgagtgccgatgaatatgcctgcgcatacgaagaataacgcgagtgatgattcgaatttccttttccctttctgacgcattgcgatccccttttctgggtcgttgaatcctagtggaggcatcccatgacccttccctctggtctgcccgtctgggcgtacatcgtcgtggccgcgctgaccgtggtatcgaacatcgccaccgccatatggacggaccgcaagggcagggaacgcgaccgggccacgcgaggggagatcaccaacaaccatccgaaaccattgcgcgacgacctcgacgagaagaaccggagcgtgctcgacgcgatcaccaacctgcgtgacgacatgaacggcgagttcgcgaccgtcaaccgcaggatcgccaacagcgaggacaacctgaccgaactgcgccgcgaggtcaacgacctacgcggccaacaccaaccaccaaccaatagaaaggaacaatcccgatgaagaactgggacaccctcgaagcggacgaggacttgatcctcaacacgcactacacgcccggacgttccggcaggaagatcaccaggatcctcgttcaccataacgcgggcaacctgagcatagccggctgctacagcgtgtggcagactcgtgaggcgtccgcccactaccaggtgcaggcggacgggtgcatcggccagctggtatgggactcggacactgcatggcacgccggcaactgggaagccaacctcacgtccatcggcatcgagcacgccgacatctccaccaacccgtggcaggtgtcggacgccactctcgacaacgggtcccacctcgtggccgcactatgcaggtattacgggctcggccgaccccagtggggagtcaacgtgttcccccattccgcgttcagcagcaccgaatgcccagccagcctctatggctcgcagaaggacgcgtacatggccaaggcgcaggcctggtacgactcgatgaccggcggcaagcccgcacctaagccgtctaccccggtacccgcaccgcagccgacagatctcaacgccctggccgacgcggtcatccgcggagactacggcaacggggacacccgtagggcccggctcggcgacaagtacgacgcagtcatggccatcgtcaaccagcgctacggcatcaccgcaggcgccggcggcaacaacagcggcaacgggggcgcgagcatcgacgacctcgcccgccgcgccatcaacggcgaattcggcaacggcgaccagcgccgcgccgcgttgggatccaactacgcggccgtgcaggcgcgcgtcaaccagatgctcggccagggcggcggctccgcgccgagcgtggacctcaacgccctggcggacgcggtcatccgcggcgactacggcaacggcgaccagcgccgcaacgctctgggagcgaactacgcggccgtgcaggccatcgtcaacaagaaactcggatactgaacaggagggaacaaccatgaacgacaacacgctggacacccaactcaacgagatcacagaaaccggcacgaacacgcccggcatcgccgaccacaaggccaacggcaagctcgagccggatgacgcgatctccggcgcggaggccgaggggctcgtgctctggttcaaggcctcattggtgcgcgccgtgaaaactgcggcccagtcggccgtcgccgccatcggcaccaccgccctgaccatcgggcaggtagactggcgcatcatcgccggaaccgccgccctctccgccgtgctctcactgctgaccagtgtggcaggagtgcccgaagtggatgccggggccagcgtcgccaaaatcgtggcgcagtgaagtctgacggcggaacaatttcggccccatccggttgtgattggctcaacgagctgatccgcttgccggatgaggccgtttttcgttaccattgaagggtaataaaagaagaagcggccgaaatgtttgacctacgtttgacctgagcggtatcgtgtggtagaaaacacagtggcaggaacggtcggcgggtatcgcgtaatcagtcttccaaactgattacgcgggttcgattcccgtcatccgctccactacaaaggcggaagtcgcaacggctttcgccttttctcatatgcgcacacgtatggcgcactcacggtacaataccgtcctagcatgggcgtcgcgtaaacacgattgccttcaaagaagatggtcgtgactgtgctggaatcaatgttcggtgctatgaagcgaagcgttggttgtgtgtctaagctggccgcattgttgaatgagtctcaacttcggggtgtcgttttatcggctgtgatgttattgtggcgcgacacgccagctttataggcgatgagtggtggcatcagatgagttcgcttgtacgtctccattctttgttgaaatatgttatgcaaagtgtgtaattggcatatgaaactgtcatatttgatgtgttgcgttgcgtttatgtgaacttattttcattgtgcatatcgttatcaatttgttatcaaggacgatcgcgagtgaaatgcgctcacttatacaatggctgttgcatggctgcccttgagggacgttcctctggcatggctttgcaatgagccgcgatgtggtcgtaaccaacgtgggattcgattgtgcggcgaagaaaaaatgatgggggggggagtcgccctccatcattcaggaaagggaactgaatggtttataacattcacatattgcaaacaaggaaaaccggtcgtgtggttgctgctgcggctgcatccgtgctgtgttgcatgggggctgtatttccagcgactatcggagtgactgcggcgtcggccgatgaacccgtcgaattggtcgtcaacggcggattcgaagacgatcttaatggttggaagtctggaacggtgtggaatagctccgcatcgtccattgccgtcactgcggatgatgtgcatggtggcagtggcgccttgagcgttactgatcgtacatcctctgatgctggtgcaatccagtctcttgatggcaaggtggaaaaaggacagacatataccggaagtatgtgggtcaaggccacggaagacggtgaattcaatatcactgtttgttcgggtaatggttccggatgtgaccagattgcgaccggaacggcgaaagcgggtgagtggacacaaatttcaggtactggaacgttaggtggtagtggtgatttcaccagtccctcgctggtgattgaaaacaagtatggcacgagcaatgccgacttcattgtcgacgacatttccgtaaccggttcggattctggttcctcattcgtgccgccgactacgggtacggcaacggcagccaaggctttcggcgactattcaaacccgattatcgattattggtatggcgccgatccgtgggctatggaatacaacggacgcgtatatatctacactacgggtgatggcacttctgtgaatgctgatggctcgttgaattatgactatgaatatgacagtactgggcagatcaaggacaattcgttcgctcaagtaaagaccatcaatgttctgtccagtgatgacatggtcaattggcgtaatgagggttacattcgtgtggctggagaacagggggtggccacctgggccagcaattcctgggctcctgccgtcgctcataagaccatcaacggtaaagagaagttcttcctgtatttcgccaatggcggcagcggtatcggtgtgctgacctcggattctcctgttggtccgtggaaggacgaaaccggtgagctgttgattaagggcggtactcctgaatccgctggtgtggtctggctgtttgatcccgcggtgttcgtggatgatgacgggcagggctacctgtattacggaggtggtgttccgacaggcgaggaagaacatccgaacacggctcgcgttattaaactgtccgatgacatgctgcataccgaaggtgaggctcaggccatagacgcacctgccatgtttgaggactccgggattgccaagataggtggtacttattactactcgtattgcactaatttcagccatgacaacgtaattgatggtaacacggtcggttacggcaatatcgcgtatatgacttcagacaacccgatggggccgttcacttatcagggtgagattctgaagaatccgagcacgtatttcggtgttggcggcaacaatcatcacgcgatggttcaacttggcgaccagtggtatatgacctaccatgcgcaaacggtggcaaaggaattgatgaacggcggtaatcttgacgcggcgcatggctaccgaaatactcatctcgatccgattacggttaacgaggatggttccattgccgatattgcaatgacatatgagggtctctcttcggtgaagaatctggacgcgtatcaagatggaggcattccagcttccaccattgcatgggattccggcattcagaacgcatatgacctgacttctggtgtgcgcgtggtcgatatgactacagacaattccgaaggtcagaagctcagcaatattaataatggtgagtggacgtctttggcgaatgtcgatttcgggaataacggcgcctcttcgctgactgtgactgcagctggcaaagccggaggcatccttgagattcgtcttgatgatccggattccgaacctgtggcttctatttcgattcctgccggtgatggatccgagtacgccgattacacgaccacccttgagggtgtgacaggggtgcatcatgtggtgttctccttcaaatccgatggtggtgcgaatgctcaggatgagctgtacgacatcactacgtacactttcacggagtcgcaggatgaaactccttcgactccggtggacaagtctgatttgcagagcgcagtgaatgagaattccggcctgaacgcttccgattacacggaagagagctggaaggtgtttgctgacgcattgcagaaggctcaggcggtattgcaggatgaatccgctactgaacagcaggttcaagatgcgcttgctgcattgaatagtgcacgtgccggtctgaagctggctgatgattccactgatggcgtggatttggcacaaaccggttcctctgtcttgcctggtgctgtgattgtcgcttacttggctctcactggtgtgatcgtagcgcgagtgcgtcgcgagatgcgctagttacctcttggtaatgcggtcatcccgtagcggcagcctcgggatgaccgcacatgaaacctagaactggtacttgttcaagcgtaagttttggcagtggtaatgtccatcacttatccatatgcgggaatgtcttatcgtcattcattgctgatttgtgcgggcatgctattggaatacgcactcgatgttgagtgcttatcatgaaagtttaaaagacttatgaattatttacgacaaaaaatttcggctagtgctatcgcggtgttgtcgacttgtgggttgattttggcgccaatgccggtctttgcggatgattcaacgccatcttcaacgccatcggatggcagttacaccacgactgatagcggtgatggcacgtattccattcccatgttgaacacggatgttccggatatcagtgttattcgtgtgtcgaaggacgatccgaataacaaagacggtcgtgatgtgtattacatggtgagtaccactatggagctcagtcccggatctccaattatgaaatcctatgatctggtcaattggtggatagtcacgtacgtgtatgatcgcatttctatgagcgatgcttcatccttgcgcaatggagctagctcgtatggcgaaggcgagtgggctccgtcgctgcgctatcacaatggccgcttctacgtgttattcaatacgaacaaccttaatggcgcttatatctactacaccgatgatattgagaatggtccttggacgaagattgcccttaatcggggattccatgatccgtcattgtattttgatgagcaagggagtccttggattatctccggcgtcaaccaatataggctgtccgatgatttaaccacggtggtggagagccatgagaatatcatctctgccgaacagttcactgatgatcttggtgagactcctaccggatttgaaggatctcagactttcaaaatcggtgattatttctatactccaacgatttactggggcaaagacggtcgtacggtgatgctgctgcgcaccactgatttgcttgatggctccaaatacgaagccaaaaagtattgtctaggtgctttcgcacaaggtagccttgttgaagtcgacaacggtgatggcacgacgtcttggcatggattcttcttccgagacacatatccgaccggacgtattcccggtttgattcctgcaacgtggggtgatgacggatggcctgtgtttggggacaataatcaggtaagcgcgtcggacacctacgacaaactgattgatttgcctgctgatttggagaatctggttcgccagcgttccctggtcaattcggacgattttgataatgacgcgcctcatcagtcttatcaggatcaggattggtggactctggaggagcctcctcaggttgacgattctctgattggaatcgagctggtggacaatggcgatttcgaaaacgggactgaatcgtggacccctcagtggaatggtacgcttaccgcgattacggatggttctctttctggaaccacgagtcttgctgtgacgaatcgtggcgaatacaatggcgctggcccgggtcaatctatggatggaaaattgcagcagggcgtgacatatcgtgccagtgcaacgattcgatacgaccatgagatggacggcgtcgattcatcggctgtgacttcccacctgttttatgtggcgattcaatatgcagacggcacaattaatcgtgtggccacaggaacagtgaaacgtggggagacgactactatcacaggtgagttctccatcccatccgacgctaatgtggaaggttccaaactcattgtcgaaaccgcgtggggtgcggaaggcacgtgcatggattacgtcatcgacgatatttccctgatcggtcttgctgatgagaaggaatatccggtcgccgaagaataccaacccaatggttcgaatcttgatttggtatgggaatggggacataatccagataaccgatattggtctctcactgatcgtgaaggctggttgcgtttgaccaatgggcacaaggtttccgccacggccaaatatatgaaaggcacttatggcgacctgacatattttgaaaccgcccgtaacgttttgtcgcagcgtacctttggcggatccatgtctgtggaaacccacatggatgtcagtcatatgaaggatggagacaccgcaggcctcgctacatatacccgtagttttgcctatgccgctgtgcgtcaagaaaatggacagcgaacgttgggtgtggtcaagcgtgtctacgacaatggcgtgaaggacgcggacggtaatatcgttgacgatacgattgatcgtgacgctgaagaggcctttgtatcgggcggcacagtgacattgccagatgatgcgaccaatgtgtggatcaagtcggacaacacactggataatgcgagtggtaagttgacgattcagtattggtacagtctggacggtaagcaatggtccaagcttggcgacgagcaggggccgctgacttacgattggagcttgtcgcactttaaggggtatcgaatcggcttgttcaattacgccaaggagaatacgggtggttatgtcgattttgattactatgacttgagcgacgtgttgacttctgacggcaaagctgtggatacgtctaagctgtgttcggccattgatcaggctgactctctgcagtctgcggaatatcctatggatgagtgggataagatgctcacgctacttgataaggcaaagcaggcgttggcatccgatccttccacgcaaaatgaggtggatgccccgcagcgtgcactgagtttgcagctcgcgcaattggcggttgaccgtcagtctggtgatggcggaaatcctggtggtggtgatcagaccggtgatggtgatcagaccagtgacggtaaccagtcgggtaacggcgatcagaccggtgatggcggccagcaacagtcttctactgctgatgataattcatctgaactgtcatcaactggttcgtccgtaacaccgatggtgctgtctgcaattgccctgatgctggctggcatcagtgtcattcggatacgccgctcttcgcgctgaaatatcgccgcagcctgttggttgcagcgattgaatgtgcggaatcagtgatgtgtcgcaatggtgggttgtgcgaatgctcggcaacgtggattcgtacaacccatcctgttatgttgagaccgcggcgtgagacatggtggagcatgacatcggcgtagaaacgggggagcagggcatcatctttctcgcttccgaaacgcgaatcgggcgagcggggcttgtctgcgggcaataatgacgttgctcccacggattcggataaggagaatcgtggcgaggatcatggtgaggaccatggcgagtaatcgatcgtaccggagacttgcccaacacgcacgctaagatgggcatcgcaataatcggcaatgagcaggtaatcggcgaggcggtgcatggagcaggaatccaacgagcaagaacctaacgaggcgacggaaatcgtaggcggcaaagtagagaccgtcgaggtttccaagcaccccgaggcttccatacccgagaccgatttgtctctggcggatatcgagcgccgtcgttcgcatccgttgcgttgggcgctgattattcttgccgtactgtgcgccatcatcgcgccgtactggttcggtcgctcgttggcggtaaataatactgactccattgtggccgtgctcgggggagtgtctccgcaaggcatcgcgctggtcggttgggtggccgtggtgatcgcgtacgtcggattggcgatggcggtggtcgtctcgccgtcctggccgtggctgattgtatttgtgatcgggttggccggcgagcagttcatcgcgggactcagcatgctcaatctcaatttctggtattccacgtacgtggtctacggcaagcaggccggcctggcgaatgccgcgaacctgggcattatgggtgcggcgatcggcatcgccgtatatgccctggtgtttgttggtctgctggtgattatccggaagacctcgccgctgaacgtactgaccaaaagctgggcgagtttcattctgtacttcgtgattgaaaccatcgccctgctcgtggtgttgtttggcggattgctcaccactgtgtgagcgcacgtgaatcgccgtacgttgctcaacactcaccactcactgctcaccaccgcgcaaaccgtgtgccgctcccttcagtacttatatgatgtgttatatttgttggcctttcgctgtttgtggtgggtggtttgggtgcggggtgatgccggtcgggtaggttggaggcatggatgcctctcacctgttcgccgccgcgcttcggttgcagtcaccttggaaggtggggtccgtggacttccgtgacgccgacggcggccggcaggagctgcgcatcatgatcgtcttcgagcccggcgcccgcttccattgtcccgagacaggccgccgggaagacgcctgcccggtgcatgacgggcgggggcgtgtgtggcggcacctggacttcttccggtgcaaggcgttcatccacgccgtcatgccccgcgtcacgtgccccgagcgcggggtgaggacggtgcccgccccgtgggccgggcccggcggcgggttcacgctcctgttcgaggcgtgggccgtggagatggcccgccacctgcccgccggcacgctcgccgggcaattggacgagaccgacacccgtttgtggcggtccgtcgcccgttacgtcgacgaggcgaggaggctggagggctacatgggtgtggaggccgtcggcatcgacgggaccggccgcaggggccgcaattgcatcaccgtggtcgccgatctcgtggagcacgatgtcatcaacgtgacgccgggcagggacccggccacggtcgaacggttcgcgcgtgatttcatggaccacaacggggtcccggagtatgtgcgtctggtcgcctgcgacatgagcctgggcttccggaagggcatccgtgagcatctgccccatgcgcggcggatcgtcgacaggttccacgtggccaggcacgccgacgaggccgtcggcaaggccgggaagacggagggacgctccgacccgctgctcaaacgggccgagtacctgtggctcaggaacggggaaagcctggccgaactgcaggtggaggccaagcgcaacctgacggggcaacggttgaagaccggccgcgcgtgccggatgcgcgaggtcctgcagggcatctgcacggacggccgcaccccgtccgaggcatgggtgcgcctgcatcgcctgtgctcgtggatgatgcactcgaggctcgagccgatgaaggacttcgcccgcatggtccgacgccacttcgccgagatcgtcgcctacttcgggcacccgtacgccaacgccgtgctcgagggcgccgacggcgtcatccggaacgtcaaacgacgggcgagaggcttccgcgacatggaccactccgccaccatgatctacctgacctgcggcagactcgacctcaaagccgtcaccaccacttgaccatcacccaccacaaacagcgaatagccgttttatttgttttttttttaagccttgtatactgaagaacgtaccgattatacatttctgaagaacgtatcagtacgatgattacccatacctgacacttgttatcgttaaggggaagtggcatgaaggcgattctgtttcgtgactgcaaggcatgtttccagtcattcaagaactggggtatggttcttatcattatggtcacggcaatattcgtggagatggttgccagtggcgcaggcattctagacccatttacttgggctgtcttttttggaccatttttcatctattcgtcatgctcggtgatggtctccatcctgtatcaggatttccgagatggactgtttgagctctatatacagtctggtcgttcctattggagctactgctggtgtaaatgcctgtttcctgttatcctgacagtgatttccgtgcttttgaatctggcttttatgcgtgttttgtcatcaggctttcagataaccgctggagcagatgatgcaattggtgctcttatcgtatcagtcttaggaacaatcgtctgttctttgggcgcaatgccgatggtttatgtctcccggaacagcgatccgacaatggcacaactggttttggtgttgattgcgatcctgctccaattggcatatatgcttgtggtcgtcaacgtgatgccgctgtgcctgttctcggttggttatgtcgtattggtagtggtcgccatcggtatttcaaccggagtattctctcgatattttatcaacaccaatatcgagctgtgacatccggacatgacggatacgaacacaaccgaatcgacgataaggaaagacaatatgaccgccgaccacatcaaccacgccgaccgcaccgacaacggcgaacatgccatcatcgccgtcgaacacgtcaccttcggctacaagaagagacagaccgtgttggaggacatcgacttcaccgtgccgcaaggccagtcgctggcgatcctcggatacaacggcgtcggcaagaccacgctgttcagactcatcgtcggactgctgcgcccccgtgaagggcgatgcgtgatcgataggcgtcgggtgccgtcgatgcgcgacgtgttccagatgaccgagaacggcaatctcgtcggcacgatgaccgtgcgtgacaacatccacttccggcaactgctgttccggtccggcaagggaatcgcggacggcggccataccgtcgactcgaaacggctggaggatgagccgctcgtccgtgccttcgaattggaggggcatctcgacaagaaggtggcggaactctcgaccggtctgcgcaaacgggtcggcatcgtcgccggcatgctgttcgacccgcatgtcatcatgctcgacgagccaagcaacgccatcgatccgatcacccgctcgctgctcgtcgattacgtcaaccagcttcgcgccgacgagcgcactttgctcaccgtcacccatgacctcgaatactgttggaatgtggccgaccggatcatcatccttgacgacaaacacctcgtcaaggatatgatgctcgccgaattcgacgactatgaggcgttcaccaaggcgtccacgctcgggcgtgaccgcacgcacgtcgacttcggccttcccgcgcgcggatggcaagcatgagatcatggcgtcgccaccgtgtcccgtttatcgaacaaggcgcatcgctgacccggcgaacgggcgccatgcctatacgcccggcgaactcgcggcccactgttctggcgcggtgctgattccgcaaccgacaaacgacggctgcgcaaccattcccatacggcctcgcagcggaaccgtctccatcctgaccgggttcctccgccggaacatgcccgccatcggtctgagcctgctgtcctcgctcgtcgtccagggactgacattgatcgtgcccgcaggcaccggctatatggtcgaccatgggtcgctcgccgcccaaagcggtttcccgccgttggtcgcgacgatgctgcttgcctcgctgctgaaactgctcgccggactcatcgaacccgtctgcggcacggtgaccatcaacggcggcggatgccggatttacgacgcggacagccgatggaaggccggcaggctggcgtatgtgcatcaggaatccacggtgttcaacgaaaccttgcgcgacaatatcacgctgcaccgtccgtggctgacggatgacgacatcgtcagggcgtgcgaggttgccggcatcaacgaggggatgatggatccggtcgtcggcttggacgccatggtcagtgaacgcggcatgaacctgtccggcggccaacggcagaaggtcgccatcgcgcgtgcggtcgtcggaagaccggacttcctacttatggacgaacccaccagtgctctggacaacgataccgagcgacatgtcatgacggcgttgctcgactccgacaatgcgtgcatcgtcgtggcgcacagactcgcatcgattcgggatttcgaccgcatccatgtcatggatcatgggcagatcgtcgaatccggtacgcatgacgaactgctgcaggccggcggattgtattcgcggctgtaccggcaggagtgagtgtccccttacacccttacgcctttaaacccttaccctttacaccttatcccttacaccctcggctcatgaggccccagtccggcccctgccgtatagttttcatttggcgtaatttcgcccgcggatagagagcgtttcgagcgaacctgcacgaaacaccgcgcaacgacacaataaggaggacgccgtggcactgacggctgacgagaagacccagattatcaacgagtacgcgacgcacgaaggtgacaccggttcccccgaggtccaggtggctctgctgtccaagcgtatcgccgacctgaccgagcacctcaaggagcacaagcacgaccaccactcccgtcgtggtatgcagctgatgatcggtgaccgtcgtcgcctgcttgactacctcaagcgcgtcgacatcgagcgttaccgttccctcatcgagcgtctgggtctgcgtcgataattgaagacttccgcccgagtacctaggatggtgctcgggcgttttacatatcgccagccaacggcaacaacggcaagagggttagaggataggccagcaggtaaggccgacaagagaacccgaatgaaggggttgacacgaggaacggcggccaaggggccagtcgaaacaaggtatgtgacgtccgctgaagaggacagttgcggttcaagcgagtcgccaaaccgcagcacagtatgtaggaataattagaaaattaaagaaggaggaaccctatggagggtcccgaaatcaaggccgttgaggccgtaatcgacaatggatcgtttggcaagcgcacgctgcgcttcgagaccggccgcctcgcccagcaggccgatggcgctgtggccgcctacctcgacgacgattccatgattctgtccaccaccaccgccggttccagcccgaaggagaactacgacttcttcccgctgaccgtcgatgttgaagagaagatgtacgccgccggcaagattccgggctcgttcttccgccgtgaaggccgcccgagctccgaggccatcctcgcctgccgcatcatcgaccgcccgctgcgcccgctgttcccgcacacgctgcgcaacgaagtgcaggtcgtcgagaccgtgctcgccgtgaatcccgatgacgcatacgacgtcatcgccctgaacgccgcctccgcctccaccatgatctccggcctgccgttcgaaggcccggtctccggtgtgcgtctggcgctgatcgacggccagtgggtcgccttcccgcgttggagcgagcgtgagcgcgccgtgttcgagatcgtggtcgccggccgtgtggtcgagaacggtgacgtcgccatcgccatgatcgaggccggtgccggcaagaacgcctggcacctcatctatgacgagggtcagaccaagcccgatgaggaggtcgtggccggtggtcttgaagccgccaagccgttcatcaaggtgatctgcgaggctcaggatgagctcaagaagatcgccgccaaggacaccaaggagttccagctcttcccggagtacaccgacgagctgtatgcccgtatcgacgagatcgcccatcaggatctgaacgaggcgctctccatcgccgagaagctgccgcgccaggaccgcatccacgagatcaaggagcacgtgcgcgaggtgctcgcggacgagttcaccgacatggacgacgccgagaaggacaaggagctgggcaacgccttcaaggaactgcagcgccagatcgtgcgtcgccgcatcctgaccgaggactaccgcatcgacggccgtggcctgcgcgacatccgcaccctgtccgccgaggtggacattgtgcctcgcgtgcacggttccgccctgttccagcgtggcgagacccagattctgggcgtcaccaccctgaacatgctcaagatggagcagcagatcgacgcgctgtccggtccgcagtccaagcgctacatgcacaactacgagatgccgccgtactccactggtgagaccggccgcgtcggctccccgaagcgccgcgaaatcggccacggcgccctcgctgagaaggctctcgtgccggtgctgccgagccgtgaagagttcccctacgccatccgccaggtctccgaggccatcggttccaacggttccacttcgatgggttccgtgtgcgcctccacgctgagccttttggctgccggcgtgccgctgaaggccccggttgccggcatcgccatgggcctcgtgtccggcgacgttgatggcaagcacatcttcaagaccctcaccgatatcctgggtgccgaggatgccttcggcgacatggacttcaaggtggccggtacttccgagttcatcactgccctgcagctcgacaccaagctcgacggcatccccgccgacatcctggccgccgctttgcagcaggccaaggaagcccgcgccacgattctcgaggtcattaacgagtgcatcgacggcccggccgagatgagcgagttcgctccgcgcatcatcaccaccaccgttccggtcgagaagatcggcgaggtcatcggcccgaagggcaagatgatcaaccagattcaggaagataccggcgctgaaattgccatcgaggatgacggtaccgtcttcatctcctccgagggcggcgaggccgctaagaaggccaagtccatcatcgattccatcgccaacccgcacgtgcccgaggccggcgaaacctacaacggcaaggtcgtcaagaccacgtcgttcggcgctttcgtgaacctcacccccggcaccgacggcctgctgcacatctcccagatccgcaacctggccaacggcgagcgtattgacgccgtcgaagacgtgctcaaggaaggcgacaccgttgaggtgatcgttcagggtgtcgatgatcgcggcaagatctccctggccatccctggtttcgaggatcaggagaacaacgcccgcccgagccgtggcgatcgcgatgaccgccgtggcggccgtggccgtggtgaccgtgacgatcgccgtggcggccgtggccgtcgctccgatcgcgatgaccgtgacttcgacgatcgtgacgaccgtccgcgtcgccgtcgctccgatgacttcgaggatgattacgacgaccgtccgcgtcgccgtcgctccgatgaccgtgacttcgatcgcgatgatcgcgatgatgatcgtccgcgtcgccgtcgttctgccgaccgtgacttcgacgatcgcgatgaccgtgatgctcgcgactcccgtgatgatgatcgtccgcgtcgccgtcgttctgccgatcgcgatgaccgtggcgatcgtgatgaccgccgtggcggtttccgtggcggccgtggccgtggctcggaccgcaacccgcgctatgccaccgacgacaactacgacgactaccgcgccgaccgcgaagagcgcactgagcgcccgcgtcgccgcgtccgtcgcgactttgatccgttcgaggactaaagccctctcacggatcggtcgcggcatagccgctcccctcacctacgggaagcccgcagggcttcccgcttaacggttcggcattcgaggactgatcgttctctagcttctctcgggtgagaagggcttgatcgcaaaccaaaaggcttctataccgtttcattcggtatagaagccttttggtttttcggcttcttcgcgctacatatttcgatgttgaatagggcactcgtgctgctgccatgtacattcagttgtcggttgacaactattctcatgcatcaagaatggcggatgatcatcgaaggtactcatgggcgttgatcactgtggcaacaacaaaggccgggcccttgtgagagcccggcctttatgccgtatggcggcggattaatccttaaaggctaatccgttgtcaatcagcgttacagaatcgccatgcacacgaagtccagaatgaacagcgcggccacagtccagatgatcgggtgaacctccttggccttgcccttgcaggtcttcacgatgcagtacatgatgaagcctccggcgatgccgtaggagatggagtaggagaaggccatgaacacggcggcgaagaacgccggaatggcttcggcgatgtcgtcccacttgacttccttcagggaagcggccatcatgcagccgacgatcaccagcacgccggcggttgcggcggacggcacggcggagacgaccggggccaggaacgcggacaaggcgaagcagatcgccacaaccacggaggtcaggccggttcggccgcctgcggcgatgccggcggaagactcgacgtaggtggtggtgttcgaggtgccgcagatggcgccgatggaggtggcgatggagtcggcgaacagggccttgtccatcttggaggagaagccgtggccgttctccagagccttctcatcctcggcggagaagatgccggtgcggcggccggtgccgatgaaagtgcccagggtgtcgaacgtatcggacatggagaaggcgaagatggtcacgatgaccagcggcagcttggtcggatcagagaacagtgccgggaagccctcggcggagaagatcgcgccgaaggtctgcggcagctgggagaaggtctcgctgatggactgcgagttggaccaggtggtcacgccgaacgggatgccgattacggtggtgatggcgatggccagcagcatgccgcccttaaccttcatcacggtgaacacaatggccagtacgaggccgatcaggaagacccacagcaccttgtcgttaaagttggccagacccggggtagccgcaacggcaccgcccttggcggcggccttcggatcgccgggagtgaacttgatcagtccgacgttcagcatgcccacataggccacgaacaggccgatgccgccaccgatggcgtgttgcagggactccgggatggccatgatgatcatcttgcggatcttggtgacggtgatgaggatgttgatcaggccgcacaggaacaccatgcacatggtctgctgccagctgaagccgaggccgaagcacacggtgtaggtgaagaacgcgttgaggcccatgccggcggcctgggcgtacggcacattggcgaacaggcccatgaccagggtgccgatgatggccgcgatgatggtggccaggaacacgccgccccacggcatacccgtctgcgacaggatctgcgggttgacgacgatgatgtaggccatcgcgaagaacgtggtcaggccggccagaatctcagtcgagacggtcgtgccgttttccttcaaatggaagaacttctccatttactctctacttccttggttttatgcggggctgcgcaccgcgcgcataatgctgcggctggccccggcgagaattgcgactcgccctgatcggcctgcccaacgcgcgtcaggcgctgcgcacccaatcagaaccgtggccgattatagcttgtggaggcaacgtgaacgggtccgggagtagactgactgccagaataattcggaacaactcaggggacacgcaggacacacccgtggaaggaaggcgcgcgatgaaaccggccgtcgaagtcagtatcacctcttggaagaagaatgtcgtcaagcccggtcaggagtacggccgcgtactgctgatgcccggcaccggctacaactgcgaccgtccgctgctctactggtcggcccaggctctggtcgaggccggctggcgaatcgaccgcatgaacgtacgcaacgcttccgacgacctgtccacggtgattccggtcctcaatcaggcgattgacggctgggtggccgccgcgcgcgagtccggcgcgggtaaagccggtgattccggggatggcgttgccgccgatgattctgctaccgtgctggccgatggcgcagctggctcgccgaaccgtgattccgacaccccgtccggccctcgcctgttgctgatcggcaagtcgctgacgacgatgacctacccacatgtggcctcacactacggtctgccgttcgtgctgctgaccccggtgctgcatcacgccgacttcgatccatccgcccgggtgattccggtgccggctgtcggcgatgatatcgtcgccgaatccgaggctccgagcgtggccgaagcaagggcgatcatccgcgcagaactggctgaccagtcgcacgccgccagctcccgatactccggcccggcaccgctgatctgcgccggcaccgccgacccgttctacgatcgagcccgcgccaacgcgctcaccccgcacgtgcacgaatacccggatgccaaccattcgatcgaggtgcccggccactggcgtcgctcgctcgactatctgaaggaagtcaccgcgtccgtagcccagtacgccgccacgctgtaatgccccgcgacacgcccgaattctgcaatgtcgctgaccatccgtaatctaatcatccgtaaaccacagaccgttggttgaagtgcgcgcgagtgcatttccgaagtttggttcgccaagccagcgcaggttgagagatataagcccgtcaagggccggcgaaggtcgcttcgcgagattatattgctctgcctgtgcgcagggcttttttgttgcccggccgaaagttccgaactccaagtcaacggccgacttaggaaggaacgccatgaagaggcccgaaaaggaagcggtagtcgctcagcttacggaagaattccgtaacgctgacgccgtctacctgaccgagtaccgcgggcttaccgttccgcagatttccgatctgcgtgaaaagctaggccgcgatacttcctacaccgtggcaaagaacacgctggcacgcatcgccgccaaggaagcgggcattgagggtctcgacgagattctctccggcccgaccgccatcaccttcgtgaagggcgacttcatcgaggctgcgaaggtcatccgtgacttcgccaaggacaacaaggctcttgtcatcaagggtgccgccgctgacggcactgtctacgatgccgagggcgccaagaagctggcagacctcaagtcccgcccgcagctgcttgccgaattcgccggcgacatcaaggcatcgatggccaaggccgcgtacctgttcaacgctctgcctaccaaggctgtgcgcacgatcgacgccctgcgcgaaaagcaggagaaggctgcctgatttacgccctcacggcatgaatcagtcgcttcgataatttaaacaataaggtttattaggcagcggatctaccacttcgtccgccgccaagattgaaaggaagccataatggctaagtacaccaacgatgagctgctggaagccttcggcgagatgaccctggtcgagctctccgagttcgtgaaggccttcgaggagaagttcgacgtcgaggctgccgctccggttgccgctgttgccgctgttgctggcgctgctgctccggctgaggaagagaaggatgagttcgacgtcatcctctccgccgtcggcgacaagaagatccaggtcatcaaggctgtccgcgccatcaccaacctcggcctggccgaggccaaggctcttgtcgacggcgctccgaaggccgtcctcgagaaggccaagaaggaagatgccgagaaggccaaggctcagctggaagaggctggcgccagcgtcgagctcaagtgatttgtgcggcataagccgcaatcacagcttttcgaggaaccccgcacctgtgtttcaggctgcggggtttccgcatactgagtagactagttgacgaggacgaggcggagaacgcgatccggcgtggaaacacaaagctggcaatgagcgaaagttgtcaattctgtgcccagtaatccgccaaaagccggtaaaagatgacacaatggcacgtagtgtggtcaaatagtgtgtccaggaaggcggtcacggtgagcgagtggacggtgaagatcaacggtgtcgaccggatcagcgtcaagccgggggagtgcgtggaaatcggccgtaagccgttacgcccccttgccgatgatggcaacacccgccttgacgtcgccgatcagaccaaatcgatgtccaaacggcacgccatgttcacggtaaaaagcaatggcacggcctcggtccgtgatcttggatcgaccaatggatcgtatgtggtgcgggaaaatggcgatttgttgcgcttgccggccaatgccgagttcctgttgccgacgtctcccatgcgcatgcagttcggcgatgtgcctgcggacttcattcgtgtcgacgatccagtggcaaagccgctcgacctcaaggtgcctgatttgtttggctatgcggttcacgaagcaccgcaggagccggatgcggcggatatgtccgtcgacgatattcttgatttgcgggccggcgagccgaccgccatcttcagcgcggataatgttcgacgcaaggtcgacgagcttgaacttggctcgctgaatatcacgcagccagtgacgaaaaacgatgagccggccataccccgtgatctgttcgcggatgcgttggcccagcatgccgagcaggagaccgaacgcaaaaaccagcaggccatgaactccgtggcactgccgaagcagcagaccgaacctgagtcgacgattgtaacgcctgcatccaagcacagcaggatctccggtattgttccagtagatgccatcgcccatgccgttgttaagcacgctcccagcacaagcgagccggcagtggcgtcggcggcggttgttgaatccgatgcagcggctggcgcaagcaagtcagccgaaaacgttcagtccgctccgaataccaggaatgccggcgattctcagccggcggacactgtcgaacagcatgctgaagttgcccagcctgaagccgcccgggaagccgaagccgctcaatctgaaaacacccagcctgagaccgctcagccggcaaccgcccagtctgaaaccgaccagccggcagctgacgtaccggacgatcagcagcggaccgcagccgaagcatatcaagaagccaccgcagcaggcgtagcagaccagcagccggctgccgaaaccgcccagcagtcggtatccgaagcatatgatatcggactccacgcgggcgtacacactccggtcttcgagcccggctcggtgttcgagcgtgtggccaagggcgagctgaaagcacaggagccggcagtcgaagtcgatggcctgacctctgacgaggcaaaaaccacgcaagatttcaatgttcaattcgaagtcgcccgtcatcccgaattgctggcgttcctcgccatgaatccgtacctgtacgacgacatgtattcttggctcgccgcccgtggcgaggccgatattgacgaagccctgtctcacaacaagggctatcaggaataccgcgaagcggttggaaagtgagtcgagagatgacccagagccagactcagaaccagaatctcacggaaggtctgaatcgcatccgtcgctggcgtgaccaataccgcagcatgcagccgccatcgccgctcgaggatgtgaatcaactggccgcgaagctggagatgacccatgcccatccctccggcatcgcccagctgttcgcttccggccatgtccggttggattcgttgttccgcgacacgggtgtgcttaaggccgccgaacgccatattgggcgcgtgctggatgaccaggccgccaaacgcaggatttccggcgtggcggagttgtcgctcgtggtcggcgtggccacatggaagggcaacgcgctgccggtgctgttgtacccggtgagcgtcacgatcgaggatgatggcttgtcgaccaccattcgattcaccggtcgcgtggccctgaacgtcgcgttcgtcaatacattgcgtgagcagggggtgttcctggatgaggattccctgtttgacggtgccagctatgacagtggcactcccgaaacttccgcgatgttcgcccgtatttcgtccgaagcgtcggagcgtatctccgacttcgccatcgagcgccagattgtgctcggatgcttcatggacccctcgtcgcagatgatcagcgaaagccgacagttcatcgaccagctggagaacggccccaccggcaatgtgctgttggacgcgcttgccggcgacgaatccgcccgcaccgcgctcaaagatgccaatattccgcaatacagtcctttcgacgtagacccgcatgctgagtacgaagtcggcgatgtggacaatacggtgcgatatgccgcgtcacttgccgccaatggccatagcatcgtggtcgacggcgccttcccgaagggcaccgcggagcaggctgtggccatcgcatcgcgctgcctgatgaatggtcgttccgtgctgtacgtgcccggcgtggccgagcagaagcgtctgttcatccagacggcctccgccaatgagatgaaggcgcaggtactggatgtatccgatgaacacgccaacgccgcgcttgataagcagctgattgccgcagtcggattccaaccgggagtcgccacccagcgattcgaccagttggccgacgaactcgtgggcgtgcgttcgcgcttgacccgctacttgggcgacctgcacgggggcaatgataagtggaatgtgtccgcatacgagaccattcagaatctggcccgtatctccgtgctcccgacgcaccctgccacccacgttcgacttgacgagtcaagtgccctgagcatcgccaacgatattgacacatggatcggcaagatggaacgcgccggcgagctcggcgaatacaccatcggcccggaagacaccgcatggtacaaggcgtccatcaccactgaagaacaggcagtaaccgcctaccagcgcgtggacgatttgctgcgtcgcttcctgcccgccacccgtgagcaggtggcacgcaccgtgcagacctgcggattcccggttcctcccaccacccgcgagtgggagcgtcaggttacggttttgaagaatctgcgacgagtgcttgacgtgttccagccggagattttcgagcgagacatcagctccatgatcgaggccaccaagccgaagagccagcgcaaggccgagggcacgtcgatgggattctgggagcgccgccgccacatcaaggaagccaaggatctgctgcgcgtcggcgcgcaggtcgaggacttgcacgaagcgttgaaggtagtcgccaagcaaggggagcagtggcatcagttcgtgcctcacggcggttggccggtgctgcccagcaagctcgacgagatcatctccacccaagaggcgctggtcagcaatatgaccgcgctggataccgtgctttccaccacacccgctggtggcaatctggaaaccgccgatttcgagaaggtggaagcacgcctgaaagcactgctggatgatcgcaaggcactggacaccttgccggagcgttgcctgctggagcaggaattcgcctctgccggactgaacgaactggtcgccgatctcaacgctcgccgagtgagcgtggagcaggtgcgcggcgaagtgcagctggcatggtggaccaccgtgttcgaggacattgtgcgttcttccgccatcatctccaaccaggatggtgctgcgctgcagaccgcatccgaccgcttcgcacaggtcgatgtggagcacgtgcgctccatcggaccgatggtgtcgcaggaatccatgcgccgcctgtgcgacatgctgttctcccgcactcaggaagccaaccagatgcacaccgtgctggcagggcgcgccagtgtgtcgctgagcaggattcgccgtgatcatccggagattctggccgcggccaagccgattctggtggcctcgccgggtacgctcgccgcactcaccgagccgggtgtgctggctgatgtggcgattctcgatgcgtgcgcgcacattcccgctatcgagttgctgtccatcatcggccgcgtgcagcaggtggtggtgatcgcccactgcgcgacggtaaccagcgaaagcgtcaagcagctgatcgacacgttgcctcatatcgaggtggatgctgccccgtctcgccgtgcgccgcgcctgtccgcattccttgaatccgagggatatggtcctgttcgctatgatgtggccaccgagccggctgccggtggggtgcgattccaccgtgtggaagcgagcggtgtgccggttatgtcttctggcctggtggaatccagccagccggagattgatgaagtggtgcgtctgattacacaacgtgccgccggttttgctgtggttccttccagctatcgacttgtggtcgtgacgttgaccgacgcattccgcacacgcttgggtgccgaattgaaatcgttggcaggcaaatccaaggcgatgggccgattcctgcgccatgtgcggctggtttccttgcgtgacgtggccggaggtcgtgccactgacgtgattctgacgatgtgctatgcgaaaaccacgcatggacgtctgcttcagcagttcggtccgctcgaaagcacaggcggtcgcggactgttgctggatgccctggcattggcggaccacagcttggatattgtgtcggcctttggttccgaagatttggacgaagaacgactgcaccagtccggtcctcggttcctgaagaccatgttgacgtgggccgaacagcttgacgaccgtccggtgcttccgttgcgtgatgcggcaggcggcaacgtgctgttcgacgatatcgccgacaggttgcgcgcgcgaggactgaacgctgctgttgattatggattcgacaagggcgtgaagattccgctcgtggtgggattgaaggacaagccgtttgccttggccgtgcagaccgatgacgcgaactttatgtccgtgcaatccacgcgtaggcgtcatcgtttgtcggcacaggatctcatttccttgggctggaatgtgatgaccgtctggagtgtcgccgccttcgtgaaccccgataaggaagtcgaccgtatcgtcagccgtatcggtgagatctatcgcgaggttgaataaccatggcggaatactcggctacacggcgcacaccgcgcaagcacaagcgcgtggtgatgaagggcactgagcagtttgacgctgacggtgtcaaactcgagcccggagacatgcagaccgaccaacaacggcaatccgacgacgacaaacgcatcctcggcgaactgccgccgcattgggccgtttttaacgagcgcgagtaggagttggggcgcactctgtgcgccccaacactgtgttttccgcagcctgtcggctgcggaaaacacagtgtcggccgaaggccgattccgcttcctaccgcacaacggccataatcgctccggcctgttgcagctccataaccttggccgcggcctccggcggcattgcgaacgacaccagtcggtcgttgcctcccaatgcaccagtcgcatccggtttgccgacattcatcaccgtggcgttctcggccagcgtgcaatcagcaccttcgcaaccgacggcggaaaccagtctcacctgatcgccggccaatacatcgtcgacgctactggccaagcggacttcaatcaccgtagtgccggtcggtgctacgggcgcatctctggccatatgcgtggaaatgggatcggctgcttcgatatcgatttgcgctaccttgcccaccacatcctcaatattgcctgtccaagacgggcctgccgcagataccggcatatcagccaactgaacgtcggcggccagaataatgtcaccccgtcgaatcgagcgggcggccaccaccatcggctcggtctccaccacggccaatacggcttcaatcccaaacagcactgcgagtcccacgcacaacgcagcagtgagtcggcgcaaggcatccgccatgcgccgtcgccgcaatgagccgcgcgcaggcggcttaataaacgaaaaggtcaccatgcaaccatggtgacctgaagtttttcgtaagcgcaagccaaatcgacctatgtggttctagcttgccaagttatccacaacgcttcaaacccgtgcaacagacagtgcccgtagtgccaatatccgcggcataccgccgtcgacaccgtcgtttacagaggaaaagcgggtgtacagaccttacttgccggatttgtcggtgcggtagaacccgtgacccttgaactcaatcggcacggcggaatacaccttgcgcacctgctcctgcgagcacttggggcacacggtaatcgggtcgtcattgaacgactgctgttcggtgaagtcatagccgcagttcttgcaacggtaatgataggtaggcaacggattcctccaacaaagtcatatttctcgcgcatggcgtgcaacaccatgccgtgcaaccgttcatatcctagtcgccgccctgacacattggcgttacggtcttactagccagcctgcttttgccactctggttccatcggccagtgtgcgtggctggttggtcagtctggcttgcgccgagtatcttggccggccggtcaactcagccggcccgattcgccaagccgccggtatccccccggcgtcagcactccgtcggccggcacatcatgtggttcggccggcaaatcggtgtccaacacctcccacggccagcacaccgcaatcagggggcacgcgggcttgcgtcgagccaaggcccggtcataccagccggctccacgccccagacgattgccttgcgggtccactgccaaagccggggcgatgaccagatcggccttctccaacgcttcgggcggtagaactgcgccagttggctcatcgggtctgtgatggacggtgctgggagagctgcagctaccggcattgttcgcgccacccactgcatccatcgagcgcaaggattccaatgaatccagcacactccagccaatttccaacccagatcccaatcgtggcaccaacacgtggcagccatgagccaacagccatcgcaacagtggccgggtttcgatttccgaacccatcgacacatatgccgccactgtggaaccatcctgaatcatgtgtgccgggaaccgtcgcaccagcaattcaccggccgctccacgttcttccgctggaatgcgcttgcgccgagacagtatatggtggcgcagcgtcgctttatccatcttttctgttttctccgtgccgctgtggtcgctgccgatattcatgccattgtccgcttcgctcataccgcacaatctagtgtttccaccgtaaaacgaaagtggccgaggcgaaggcgcaagcccttcatatggctacaataaaggccgtgtcagttttccagtcgattaaagaggcgttcaagctggaccaccagatccgtccgccgcgcctcacccatcccggtttcccgataatcctgcgccccctgaccatggacgatgaggacggctggaacgaagtgcgctggcgcaacaacgactggctggcgccttgggaatccggcgacccgatgcatggcggctccatcaccttcaatcaatgggtgcagcgacagcgccgtaatgagcagcatggcgtcggcgtgattttcgccatcgaataccagatgcgtatcgtcggccagatttcgttgggagccatcgcgtatggtgccatgcgcaccggtgtggtcggatattgggttgaccaacggtacgccggccgcggattcgcgccaatggcactggccatgcttgccgattgggcactcggagacccattcgggcccgcgttgcatcggctggaaatcgccattcttccggataacgcgcgctctttggctgtagtgcgtaaggtcggagcccatcatgagggactgcgcgagcggtatatgtatgtcaatggccagtggcgcgaccacgtaacatttgcgctgttggctgaagatatggggcaagggttctctgccagactcgccgccaccggttccagataagcgtcgaccggaagaattccgctccgacacgcccggacggaaagccccagttcgtcggtacgtctcctatccttgactctatgggttatgagtcactgagcactgtcgtcgtgctggtgattgtggcgattattatcgttgtatggctgcccgtacgtacggccaacggcatgaaacgtgtggacgagcaccggcaggatcgttattcgccttccctgcatatcgttgatgcagagaacggcagacgattcggagacatcaagccgcataaggcgaaaggggcagcaatgccagcatcaacaccgtcagcgaggctgacacctgagcacatcgcccatgtgcgggaactgcgccgcgcggccatccgccgccggcagattctcgccgtatgcctgcttgccataaccgtgttggtgtttgccgtatcgttccccctgcatttcagcccgctgcttgctcttattccgttcgtgctgttactgctggtgctggtgctgggagccaatgcctcacgccaggcccggcaatgggagcgcaaggtggtccgctacgagcgggctcatagcggtacgggctggtccaagaaaccgtctgccgagtccaaggacagcaagcgtgtgaacaaggccgaaccggttgcggccgtaactgcgcctgccaaggagctttccgagcatgttgaggatgctgccaccgaggtcatggaacagcggcagattcgccgcgcgttacgcgatgccgagattgagcaggccaaggccaaggcgttgcgtcagtccgccgccgcatatcaggccgcggcggagcacgccaaacagtctgagaagtctgatactgcacagtccgccgccgataagcctgccgccgaaccgtctgctatggtcgatgaatccgctgaccgtaagtccgctgccgaaaccagtgaatcttccgccgcgcccgatgcctccgctcgcacggataagtcgactaagtcggataagtccgtcgcccctcgagttgaaccatcgcttacggtgcgtgacgagcgtgatgagcgcgacgatgccgctgccgacgctacgtcggaactggccagcgtacgccctgcccgagcactggatgtcttcgatatggccacctcgcaggatctcatctccttcactttgggcggggaacataacgccgacaacgctccggaaagcttggagatcaagtcgacccgtcaggtgtccaaggcggaacctgtcgaacccgcagtggcggaaaagttgattgacgaggcccgagccgtcaaggccgcggacgatgccaaggccgccgatgcgggcaaggctgtcagtgccggaaacgctgtagacactgagtcggagcagcgcgatgatgccgatacgaacgccgctacggacgccgatgacgaggctgcaaacgccgcccagcgagccgcattccacgaatccgaggagcgtgccgacgtcgaagcgccagcggcgaccaccgattcgttgggcgcaggcctggactccattcttgcccgccgcggcaactgagcgttgcgattcgccgattttctctcacagcgttagcactcgagttggcagagtgctaataatcgcgctacgatgtgtcctagcgcaaagggacaacgcaagtgatcgtcagcctcttgaggcgttctggcgcggcattatcgaactacaagtagatacgaggtgacccacagtgtcgattaagctcacaccgttggaagacaagatcatcgtcaagcaggccgaggcccagacccagaccgcttccggtctgtatattccggacaacgccaaggagaagccgcagcagggtgaagtcctggccgttggcccgggccgtcgtgacgacaagggcgagcgcatcccgatggatgtcaaggtcggcgacaaggtgctgtactccaagtacggcggcaccgaagtccactacgagggtgaggactacctcatcgtcggcgcccgcgacattctcgccatcctcggctgattagtcgcctagcgaacttcaacaaccccgactgttcccgcggatagtcggggttttctcttgctaggcggaaaggggctccccctcagagaggggagccgaaagctgctcccaccaaacgcccagccatgcctgctatgcataaaggtgcatgcgcgcaacgtagttgagttcggcgttgcaccgcatctacactgggtaacggattggggtccctatggaagaggctcagtcggcgacttggccgagcggcttaagacattttgcacaagacggcagtagatcgacggtatgttgttttttccgtgtcgcaggttcgtggtgtcgtcgcgctgtgccaatggttgtctctctaccgacgctgagtgccgtggcatgaggccagcgtcggcagtgggccacggaatggcgatgtgccgatgctgagccgcgttggcgtcgttatagggccagtttttggaccattgccgacggcaaatcggcgttttgtgtcggcgacggtccaatacctggcggtctgctgacgataagtgccgtcatcgtcggcagaccgccaggtattgtccccgtgccgacgtaaaaagccctgccatcgtcgtcaccgagccattttgtgactcactgacggcggcagcagggcggaagaggccgaaatcatgcgcgcggtgcggtctcacacctcgaatccggcctccaccagcgcgtgatcgatgtcgcgaatcaaatcgtccgtatcctccagacccacggccagacggaagaagccgtggtggaactcaggcgggtacaggtactggcgctcgtcatcctcgccgaggaacacgatcagcgattcgtcatggccgagcgagacggccgacgtaatcacattgagcttggaaacgaaccggttgtgcccgtcatgattggtgtcgaggccgaacgacagcacgccgccgaacccggagtccgggcgggccagctggctgaccgccacctcgtggtgcgggtgcgattccagaccggggtacgccacgaaacgcaccacatccagcgattcgagatgcttggcaatcgccaaggccgaggcgtcgtagggcagcgcgtaggtgttcgccagcgtgatggggcgacggatcgcgccggtttcggcgtcgaccccgttaccgaggtgaatggccagcgtgccgaatccgagcggctggtcgtcgaatgattgtccgtgatgtacaagatcagaagccatgcgcccagcatgccagcatgcgccgtgccgcgcaaacaggcgacatcgctcgaaaaccgcgccattgcaaggttctagagcaccatataagaaaaaatgattgggtgaagtgcggggtgcagccttggtcggggctgtttgcagggccgaagcgggccctgaaaacacgctgtgagacacgccgataaaaccgcagaattccgcggtaaaacaaggttcgcgtaggggtcgatttgcatacctggaaaatctgtggttatatagccaagttgcctgttgaggtcaaacaccgcggcgggaaacagactggcggatttcccaagcggtcaaagggagctgactgtaaatcagccgcttcgtgcttcagtggttcgaatccactatccgccacgccccgatagctcagtggtagagcacttccttggtaaggaagaggtcgtgagtccaattctcactcggggctctctggcggggtagctcagctggctagagcgtacgactcataatcgtaaggtcaagagttcgagcctcttcctcgctacaaatcgcgcccgctaaccggtgggcgcgcactatacctaagaacacagaggtgaatgacaatggctaagagcgccgacatccgtccgggcatcacgctggcctgcaccgagtgcaaggagcgtaactacattacgactaagaaccgtcgtaacacgcccgaccgtcttgagctcaagaagttctgcccgcgctgcggcaagcagaccgtgcaccgcgagactcgttgatcgcaagtatcacagctttacaaaacccggcccattcggccgggtttttgcgtattgcctccggaggcgagtggcagggtgcggaatcagtatccgcatcgcgtgagaaacggcagaaatcccgcgtctgaacgaacccctcgcgggcgttctgtcgtttcgggccgccaaaacggcagaaatcccgcgccaccttcgttcagacgcgggcgttctgccgtttcagccgatgattgcctcgatatcgcacctgcgccactaagatagtaagccatgacaagctttgcagacatcaccaccatgggcgtgggcggccccatcgcccatttcatcgagccgaccacgcgcgtgggactcatcgaagccgtggaggatgccgattccaaaggcctgcccttggtcgttatcggtggcggctccaacctgcttgtttccgataagccttttgacggcgtggtggttcgagacgcccgacgcctcatcactgtgccggacgaggctgcaccggtagagggcgaggatcgcaccgtgcatgtcaatgccgaggccggtgccaattgggatgatttcgtggccttcaccgtagagctcgggctcgagggcgtcgagggactgtccggcattcccggcacagtcggcgcttccgtggtgcagaacatcggtgcctacggacaggaagtcgccacttcggtcgaatcggtggaagtctgggatcgagacaccaaaacaacgcgcgacctcacacccgccgatcttcgattcggctatcgatactccgcactgaaggccagcatgtacgccggtcccggccagccggccgaccgattcttcccgacgccacgttacgtggtgctctccgtcacctttgccctgacccactcggccgaaggcacggtaggttacggacagcttgccaaagcgcttggcgtcgaagtgggcgaccgtatggccaccgccgacatccgcaaagccgtgctcgcagtacgtgccgccaagggcatgcttgaggatcccactcgctacgccttgcccgacatggccaccgccaagcgcggggccaatatcctgaccgatctggagcgtctggcctccctcaatgaggccgccggcattcccgttggcgatgacggcctgcctgctcccgactacaatcgccacagctgcggctcgttctttatgaatccgattctgaccgccgaccaagcggcggccctgcccgaagatgcgccgaagttcgacgcgactctgcctgacggcactcccggcaccaagacgtccgccgcctggctcatcgaccatgccggctgccataagggatataaggtcgatgcggacgcgccggccagtctatccacgcagcacacgctggccttgaccaatcgtgggggagcgagcgcggccgatatcgcagctttggcgcgtgcggttcagcaggcagtcaagagcgcgttcggagtggacttggtgcccgaaccggtctgcgtcggtgtgctgtaatcgcgctattgattgatggagtgggttattaatcccatatattgcggactctgagtcttattaatagacaagacacgcgggctcttctatactcgattgtcggtattgtgcgcattcggtgcgcaaacaacagagaaaaagaagagcactatgcaactgttccgtacaaaatccgtcgaacagaccattgccgaaaccggtgaagagggccgcaagctcaagcgcaacctgacttggtgggatctgtcaatcatgggtgtggccgtagccgtgggcgccggcatcttctcggtgggcgcgcaggccgccgccttccacgccggcccggccgtgatcatcagcttcctgatcgccggcatcgtgtgcggcgcagccgtgatgtgctacgccgaattcgcttcgatgattccggtggccggctccgcctacaccttcacctacaccacggtcggcgagatcatggcctggatcatcggctgggatctgatcctggaaatgctgatggccggctccgtgatttccaaatattggggcgtatacctcaacgatttcatgcgcctgatgggctggaacgccaacaccaacctgacgttcggctccttccacatcgatatcgccccgatcatcatcgtggcgttctttaccacgctgctcgtattcggcaccaagatcggcgcccgcgtggacggtgctatgaccgtgctcaagatcgccatcgtgttctttgtggtgatcgtcggcttcttctacgtcaaggcctccaacttcaccccgttcattccgccgagccagccggcctccaccgtggaaggctcctccgccgtcaccggcgtgatgacccagccgttgtggcagttcgccaccggcatgaccccatccgtgtacggcgttcctggcatcctctcgggcgcggcgctcgtgttcttcgcgttcatcggcttcgacgtggtggccaccgcctccgaggagaccaagaacccgcacaagaacgtgccgctcggcatcggcgtgggcatgctgctcatcatcgtcatgtacatgctcgtggccgtggtgaccaccggcatggtctcctatgccgatctcgccaagcaagacagcccctcgctggccaccgccttcgaactggtgggtgccgactgggccgccaagatcatcagcttcggcatcgtgctgggcctggccaccgtggtcatggtgctgttgctcggcctgacccgtatcgtcttcgccatgagccgcgatggtctgctgccgcgcggcctgtccaagaccggcaagcatggcaccccggccgctctgcagatcgtcgtcggcgcggtggtggcgctcgtggccgccttcttcgacatcggcgtgctctccgacatggtcaacatcggcaccctgtccgccttcacgctggtggccatctccatcccgattatgcgcaagaagcgccccgacctgccgcgcgccttcaagatgcccggcgacccgtggattccgatcctcatcgccgtggccaacttctggttgatgctcaacctgtccgtgctcacctggattcgtttcgtggtgtggctcgtggtcggcgtcgccatctacttcggctacggctactggcatgcgcgcctcggcaagggcgacctgaccgaaacgctgtccgccgaaaccgataaggccgttaacggctgagagcgaggagcgtcccaacgggcgcgtacccttgtatcagtatttgttaaggaggattccatgccatatgtgatcgctcagccttgcgtggatgtcaaggacaaggcttgcgtggacgagtgccccgtcgactgcatttacgagggttcccgctcgctgtacatcaaccccaacgagtgcgtcgattgcggtgcatgcgaaccggtgtgccccaccgaggccatcttctatgaggatgatctgccggacgagtgggcttggtacaaggatgccgctgtcaacttcttcgctgaagtcggcgatttgggcggcgcttccgccaatggcccaatcggcaaagacccggaacaggtcgccgcgctgccgccgcagaaccagtaagctgatttgcggataagcgctgcacacagcgcatagttcggattgaaccctcggtctatcacggccgagggttcgtcgtatcttaggaacataccgtccaagaaaggggttctcatgggcttccacgcatattcgtcgccatacgactggtctcgtatcgccggcttcaaagccaccgccaaaaccgtgccgggtggcatgatcgacctgtccgtaggctcgcccgtggacccggtgccgagcagtgtccagcaggcgctggttgccggcgcagacgcccccaacgcccatggatacccggtcaccgccggcagcgccgaccttaaggccgctatcgatacatggttccgcgaactgcgcggtgtggatctgaagtccatcaacgctgccgccgtacccaccgtgggttccaaggaggccgtggcactgatggccagcctgctgcaccttggcgaaggcgatgtggtcgtccaaccggccgtctcctacccgacttacgaaatcggtacccaacttgccggcgccaccgtggtcaaagtcgatgatgtgaccgacgtcgattcctgggtgaatattccgaacgtcaaggccatctggatcaactcgccgtgtaatccttccggcgaggtcatctccgctgactggctgaccgacatcgtggctgctgcccgtcgcatcggtgccgtggtgctctccgacgaatgctatgcgttgatggactggcgttcggtgcgccgcaatacagcctcgtcctctgcgcctgccgcgtctgcatctgctgcgtctgtgcctgccgcaccggtggccgaatccaacgagcccgcctccgataccgcattcagtctctccgccacgccatgtgccctgaattcacatgtgtgtgaaggttcggcagctggcatcctggtgctctactcgctgtccaagcagtccaacatggccggctaccgtacggctctgattgccggcgattaccggctggtcaaggaaatggccgaataccgcaagcagatcggccagattatccctggcccagtgcaggccgccatggctgcgggtctgaaggacacagccgccgtgcacgagcaatggggtcgttaccgtcgccgcctatccgcgctggttgacgcgctgaaggcgtatggctatccggcgcaaatgccctccggcgcgctgtacgtatgggtcaaggccaagtccggcgactgctgggccgatatggccgagctcgccaagatcggcatcatccccagccccggcgaattctacggcgctcccgcctacctgcgtttctccgccaccgccaccgacgaggccatccgctccgcctgcgaacgtctcacggcgtaatgagatcgtaagtggcgttgagccgttcacgccccaaactgcgcggccgcattgccaaatttgcggcgcacagcgtccagtgcggcctcggcatcatgcaaacgcgcctgtgaggtctggccgcgggcattgtcggcctcttcgagcatgtcatccagtgaaggctgcacggccgtagccgccgccttactgagcgaagacgtgctcatgccggccaagcgaatagttttgggcaggggagtggcagactccgccgaggccggtagccccagcatgactttcagctgccgcacgcattccgggtacagcacgccggccgtatcggtcggccgctccatcgtaaaagaccgggtctgatagctcaggtcggcgaaccgcaacttcaccgtcagcgtgcgcgccaccagccccttgcgccgcagcgtgctggctacttcgtcgcaggccgaacgcagtagcccacacaccacgcgcatatcgcgtgtatcctcggccagggtttcctcggacccaatggatttctcctcgcgcaccgtggtaatttcgcgggaatccaacccgtgcgaggccgcccataatccacgtgccgcagctggggagccagtggcacgagtcaatgcagcctcatccagctgagccaattcagccaccgaatgcacgccccaagcgttaagccgcttctccaaagacggcccgatgcccggaatgccacgcaatggcatcatctgcacgaattcggccgatcgggccgcgggaatcagcagcatgccgtccggcttggcattggtcgaggccattttggacaccagtttgttacaggcgatacccactgaacacgtcacgtggaagcgctcggccacctgagcgcgaatccacgcgccgatcgcgctcggccgcccccactccagcagtgcggcggacacatccatatagccctcgtccaccgaaacctgctcgaaccggtcggtgacggtcaaaaacacctcatgcatgattcggtgcgacatcatgcggtaatacgccatatccactggcagaaaaatgccgttcgggcacaaccgatgggcacgcgcggccggcatcgccgaattgatgccgtatttccgggcttcgtagctcgcggcggacaccaccgcgcgcggcccggtgccgatgatcaccggcttgcctttgagcccggggttgcgcgccacctccaatgaggcatagaaggcatccatgtcgatatgcagcacggtgcatccggtctcgtcgtggccccaatcgcgtttggcggcctcaagtctcggtgcggtgctcatgccaccattgtaggaatgccgaacgaggtcatgctcactatgtggcgcgcatgacgcggcgctcattgtcataatgccgaatatcgccggaattccaagggtttacgcactgtgcggctgtttcgcatggtgggtgcgattccacggaatcgtccacattgcgtcactgtccgtaacgccttccaagtcaatgcgcgctgtcccggctctccgagtagcgtaaacctcatgaagaaggcagtggtcggtatcctcaaccgtgttcccgtggttcttatcgtgattggtgaggcactggtgatttatttggctacggccgtcgccaaacttgcgttcacccagctcgatccgctgtactcggtgtggtatcgcgtgggattcatggcggtgctgttgctgctgtggcgcaggccctggaacaaggcgaagcgagcgcaactgtttcaccgcgacgcccgcagctgggggctggtcgtactgctcggctgctcgctggtgctgatgaataccctgttttatgtggccatcagcaatatggatatgggcattgccgtgtctatcgaatttttgggaccgctttcggtggcggtgattaccggcaaaagctggcgcgagcgggtcggtatcggtatcgcggcggtcggtgtggtgctgttagctggcatatcattggccaatccgtccggcaatggcgcgtttttgtatggtctgattgcgattttgatcggcgggtcgatgtggggcatgtatatcatcaccggccggcgcgtggcggctggcggcaattcgctggataatctgtgcatcgccgtgaccatcggctggctggtccagtccctgttccttggcgtgccggctgtggctcatgtggttcaccccaaggccgatgccacgtgggcgcttgagcccggcggctcgctgaagctgctggctctgctgtttgtgatttccctgatggcctcgttcattccctatgtggtggagcagatcacgctgcgacgcaccacatccggcgcattttcggtaatgcaatccatcaatcccgccatggcggtggccgtgggactggcgttcggcgagattcccagcgttggtgaaatcgtcggtgtggcgttggtgatttgcgcggttatcgttacgttctccggcgacgccgcacccgcggacgttcaataatgtgtcgttcggcacgccgtatccgcaggacgtggtacagtaatttgctgttgcgcattattgcgtaacgtggagtcatgcctgagtggccgataggggcaccctgctaaggtgttagtcgtgtaaacggctcgagggttcgaatccctctgactccgccgattaaggttccgggtgaaagctcggaacttttttgttttccggaaactccgggttaagtaactcctgaaataaccgaggacgggcggtctccgcttgtggtaagcggagtcggaggtacgccattgtccgtccgcctccaaaccgccattttagtgggcgaacgagtgcggcacgtcgggaaaagtccgagcgacgaaagaaaaatgtccactaagtgagacttttgcgtggtgttcgtgaatggtgattgaagattaaccggtttatatattgcttgtccaatcgcttgctcatcgcctccctccccgcagtacttgaccgagatgggcggtaccctagagagagaagaagagttccgaagggcgggcaaagatgagccatatcgctgggcaggggcaacatcgctccaactcgacacgaaccaaccgtgcggcgctgattatcgtgttcgtgatcgtgctcgccgttgcgctgggcatcggcgcatggttcgcaacccatcgcacggacggcaatggccccgcacacgccggagtgtcggacgtcgcgttgaataaagcgaagaacacgcccaaaccggtgaccgaacatcacggcaattcaccggattgcccggatacggactgcatcgccatgctggtcaacggcgatttgttgttccatgagggattgtggagccatttccaaggcccgaaccccaacgccacggatggcaccgccttcaacttcgacccgctgttcgcgccgatgaagcagtacattcaggcttcggacatcgccgtgtgcgaattcgaaaccccgatcgcccagcgcggcggcccatatgccgcgtacccgatcttcaacattccgccggaagtggcggatgccgcccgcaacgtgggatacaacgcctgcacacacgccaccaaccattcctgggatcagggggcggatggcatcgcccgtctgtgggacacgcttgaggccaatggcatcgcccagaccggctcgtacaaaaccgaagccgactccaccaaaccgttggtcatcgattccccgaccggcggcggcaagctgggtctggtcaccggcacggtctccctcaacggcatgaccgccgacgaggactggcaggtggatcgtctgcgcgaagacggcgacccgaatcacgacagcgacatccagcgcgcggtagacaaggccaacaaggcccgcgagcaaggtgccgatgtggtggccatcgccatgcactcggtgcaggaataccttgattacgccgattcctggcagatttcggaagcccatgagcttgccgacactggtgccttcgacgttatctacggtgccggctgccattgtgcgcagcccatcgagaactataacggcacgtggattatctacggtctgggcaacgccgtcaccgagtcggcgaacacgccggaaaccttggtcaacaaccagggtgtgaccgcacgcatccagttcgccggcaagaagggcgtcaaggggtcgtggcgcgtcaaccgcatcgactgggtgcccaccgccaacgtgcatcaaggcaactaccaatggtgcccgatatccagcgaccatcccataggcacatgttgggacgaagcctacgacgctcagatacgccaacgcatctgggatgtcatctattcgatgggcgcggaccagaacgtcgtcaaggaatggaacatcacgcaggagcaggcggcaaagcaatagttgctcggcttggtctcaaggaggggaagccgcaaggtgacgcttttcccgtcggcctcctaatgtggagcccatgaccgagatttacgaaacccaaagcgaacgcaccgatctgcccctcgtcgtgatgccgtccgtgcttgactcgatgatcgagcccatcaaggcccagttccccgcgctccacgacgttgcccgcgtgcgtatgttcgaggaattcacgtccgacgaggcgaccatagccgagcgtctgaaggatgccgacgccctgctggtgggcggctaccacatttcggacgatctgctgcgcaccatcagcgggcaggggcacgtcaagtgcatcgtgttctgcggtaccggcgtcgccagctacatcaatctcgataaggcgcgcgagctgaagatccgcgtctgcaacgccgaacattatggcgatcacgccgtggccgagcacaccttcgccctcctgttcgagctcatccgccgcgttggccaactcgataaggatgtcaaggccggcaactgggcgtgggccggcggcgatggactgcaactcgccggccgtcgcatgggcatcatcggactgggcggcatcggcgccaccgtggccggcatcgcccgcgccttcggtatggaggtcgccgcatggaattcgcatgtgccgcccgagcatttcgaacgctccggcgccactccggtcgacgatctcaacaagctcatcgaaaccagcgacgtcatctccgtccatctgccgctgaacaacgccacgcgcggcatcgtcaccgccgagaaccttgcgcatgtgaagcccggcaccctgttcatcaacaccgcccgctccgaagtcatcgaatccggtgcgctgcttgcccgactgcaaaagggcgatgttcccgccgcactcgacgtgttcgaccatgagccgctgaccgccgacgacgccatctgccatgtgcccggcatcgtcctgaccccgcacgtcggctggcgtgccgacggcgcgttcaaggagctcacccgccagatgatcgcctgcctgaccgcctacttcgccggcgaagactataacgtcgtcgtctccgaacgctgatagccctgcctagcctcgcgctcaatcgaacacccagccagtcgaccaccggaacacgctcatgcagacgattctcaacacgcccgacgatcctgcccacgattcgctcgtcgaaaaaaagtccgaatttatcggcgacgccgcccatgtcgatacgctcgacgaggcgctcgcgttcgtggctgcgatccgtgagcagcatccgaaagcccgacacgtggcgtatgccgccgtgtgcggaggcgcggatgggcgactgtccgaacgcatgagcgatgacggcgagccgtccggtaccgccggcaagccgattctcgacgtactcaagcagtcgggcaccaccgattgcgtggttgccgtcaccagatatttcggtggtattctgctgggctccggtgggctggtccgcgcgtactcatccgccgcatcattggcgatgaaagccgcccgcgccgcccgcatcatgaccgccaagcgataccgggttcgcctcgaatacccgcagttggcccgattccagcagatcctggcgcagcttggtggcagtcaggaggatgaatcgtatgcggtgaacgtcgagttgaccgcggtggtgccgcaggatgattgcgcgcgattcgaggagcgtgtgcgggaagcgttcaatgccgctgtggtgccggctccgattgacatggtcaacattccggttccgctcgcgtgacgcctgtatgactaagctgggcatcatgaccgacgagaacaccaccagccagcagacccagcccaccgaggccgcaaccgaggccgcggccgagactgcaaccgacacggacgcccagcagcaggaccaaggcgcgcagtccgcagccgagtccgccgctccggtggatttcgaaccgctgaccgctacatacgagcgtctgcgccattccaccgacccggccgaactgtccgaattcgcccgtcggccgttgcctgaccgtgccgatcaggcggcgttctcccgcgccaccgcacttttggaggctgtggccggcaacccgcacaccccggtggccgatcgtgtgttcctcgccgacaccatgccgttcccgaacgtattggtcaaactctccgaagaccccgaaccgtccgtgcgtcaagccgtggccgccaacggggacgacaagaattggctggtcggccgtctgaccaaggacccggtgcctgcggtccgggatacggcgttgaaaaacaagcgcaccagctggaagatgcggcttgagggtgcgcaggaccccactgcggatgcggagacattggatttcttgggcgtacttggcaccgaatccgaagagggagcaccggcggtgctttcttcgatggtccgccgtgccgtggcactgaaccccaatacgtccgaagcgatgcttgccaaattggccaacgacccctcggctgaggtgcggcacgccgtggaaagccgccgctaagcacactattgctgtgttttgccgcgcaaatttggccggcaatcaccccctgtccaccattgtgagcgctcacatctcactatgtgagggtaaaaagtacataatttggcggaatcatggcatttttcttacggtgtggcgcaatcaaacggcgttagactggggctatgagtgagattaccgagagtgaagagcgtctggcccgtccgttgattcgactggccaagttggtcggtgtcggcacgagttatttgggcatgagccatgactaccacgagatagacgatgacgtcctgatcgaggtgctggcagcgctgggcatcgacgcctccagcgagagcgcccaactcatcgccatccgacgcattctgaacgagcgttacgcccgattggtggcacccaccgtgctgcatatcgccggtagcgaggaccgggtgctggtgaacaccggtattctggacatgccttcggcgagcatcacgctggagaatggcgagccatatcaaggcaccattgaagttggtcctggagatggatcccaggcctacgacttggatggtacgttcatttcgaatgcggctgtggtcattcccgccgatctgccgattggttaccatacgctgcacgtcaaggtcgccgaccgtgtgcaagacgccactttgatcagtgcacctgatcgcgtcgatctgcttgacccgatgaagggcggcagtctgtggggctggatggcccagctgtactcgattcgctcctccaactcctggggcgtgggcgattacgaggatctgaagaccatgctggtggacgccaagcagaagaccggtgccgacttcgtgctcattaatccggtgcatgccgccgagccggtgtccccgctcaccccgtcgccgtatctgccggtaagccgtcgcctgatcaacttcacgtacatccgtcctgaggcgatcgccgaatatgccacgctcagcgagggcgacaagaatgccgtcgacggactgcatgccgacaccgaaccgctgaacggtgattcccagctcatcgaccgtgacgccatgtggcgcagcaagatgcacgccctgtggattatctttaaggccggccgtaccgccgaacgccaaagcgtattcgaccaattcaaggcggactgtggttccgacttggaggcgtatgccacgtggtgcctgtgctacgacaagtggggagcacccaacggcgaggagagcaactgggagcgcaagttcaatcgcaactccccggaaatcgccaatctgcgcaagcagtacccggacactttggacttctaccgctggctggaatggattgccgccgagcagctgtcctccgcccaacaggcagccaaggacgccggcatgcatatcggcatcatgtccgatatggccgtcggcgtgcacccctccggcgctgacgtgtggtggaatcccgagcgcttcgccaagggagccacggtcggcgcaccgccggacatgttcaaccagcaaggccagaactggagccagccgccgctgagcccgatcaatctggagaccaccggctacgaggcctaccgcaatatggtgcatggcatgttcgcccgtgccggtgcggtgcgcatcgatcacatccttggtctgttccgcctgtggtggattcccgagaaccgttcggctatggatggcgcttacgtgtactacgactcagacatcatgctgggcgttctggccatcgaggcctctcgcgccggcggcgtggtcgtaggtgaggacctcggcgtggtgccggaccatgtggccgattccctgtcgagccacggtattctcggttgcgccgttgaatggttcgagcagtgcgacggcgtgttccgcgccccctcccagtggcgtccgtatgcattggcctccgtgaatacgcatgatttgccgccggccgccggttacctggaatacgagcacgtcaagattcgtgagcgtctgggcttgctgaccggcccggccgaggaattcgaagcctccgccaaggccgagcaggatgcgatgctgtccatgctggtcgagcagggttatcttgatgccgactttgccgaacatcgtgaggatcacgaggcggatatcgtcgacgcgctgtaccacgcactgaagggttcgccgtgcaagctgctcgccgcctcgatcaccgacgcggtgggggagaagcgtgcgcagaaccagccgggcaccaacaacgaatacccgaactggcgcatcccactggccgacgccaagggcaacgtggtaccgctcgaaaccctcttcgactcccccggtgcccaacgcttcgcccaaatcttcaattcctgacccgctttacctccctctgacgagccgagtcgttaagcggacagtccagtggactgtccgtagacgaggcctgaaagaagcgatagctgagagaaggcagggaattgcctcaccgtaggtgagtcggttagccgaagtgggtgggagagaaaccataaataggggaagagaagccataaacccaatggagtgtccccagttgccctatgtcaagcccggcgatatactagtggattgttgtgtttccctaaggggtccttcaaagcgctatcccactcgccatcgaggactttcagggagcccacggataatgaggttcgacgcctcttggatgcggccctgaccaagccacaccaagcagctgagacccggaacacaatatagaaaaggtaatccagtgaaaactttcactccgaagccagctgatctgactcatgactggtacgtcatcgacgccaccgacgtggtgctcggccgtctcgccacccaggctgcaatcctgctgcgcggcaagaacaagccgacctacgctccgcacgccgattccggcaaccacgtgatcatcatcaatgccgacaagattgctctgactggcaacaagatgggcaaggaactctactcgcactccggccgtcctggtggtctgcgtcgtgactcctacgccgagctgctcgagaagaaccccgagcgcatcatcaagaacgctgtcaagggcatgctgccgaagaatcgtctggccaaggtgcagctcgaccgcctgcgtatcttccgtggcgccgagcacccgcacaccccgcagaagccccaggtcttcgagatcgcccaggtctcgcagcaggccaagtgaaacctgagaggagataagaatcatggctgaaaacaccaacgactcccaggttgtcgagaccgaagaggagctcaccaactacaccaccgagaccaacgctggcgctggcaccggcacctccgcgattgagccgggctacggcaccggtcgccgcaaggaggctgtcgcccgtgtccgtctggttccgggtgacggcaagtggaccatcaacggccgcactctggaggagtacttcccctccaagctgctgcagcgtgaggtcaactccccgatcgttctgctcaagctcgaaggcaagttcgacgctatcgtcctcgttgacggcggcggcaccaccggccaggccggcgccatccgcctcggcgttgcccgcgctctgaacgccatcgatcgtgatgccaaccgcgccgccctgaagaaggctggcttcctgacccgcgacgctcgcgtcgtggagcgcaagaaggctggtctgcacaaggcacgtcgcgccccgcagttctccaagcgttaatttcgcttgtcctgtaccgagcatacaaaggctctccgcggaattccgcggagagcctttgtgtttgtgtcgcgctgtcttgagtgtgactcacacctgcttcatcagcgtgatgctcagcgccggcatggtccagacattgtcgtcgacgggagtgtccggtgtatcatccacaggggcatcgggcatatcagctgatacctcatcccgaggcgcggacgaggtgccgtttgcggcgtgatctgttactggcatcgcgaatttgatggtatccgcttcattctcagtcgaggattccgtacgctgcatggccacttcttcgaccatcttgagtactgtctcgctggcgtccggtacatgctgcgtccagacggtggtgtcaccgttcaaatcgcattcctcgacctgagtgccatgcccggctcggcggccgttgatttcggccgagcaccatttaggcgtccagtgggtgtctggcggcaggcggaatgtgcggtcgtcagcggtgccgttgaccacaatgcacacgtccacctcactgttggacagcaatcgcatggtgaagctacgtacgcccagatcgaaccagtcacgctccatcggcgtggtaccgtcgggcaggaaccactgcacgcggcttgagggcttgagtaggccgatctgggtcagtcgggtgaagaaatcctcgtggtgatacaggtccagtgatttacgcagcgccaccagtcgagacacggtttccaagcggcgcatttcgcgcgtcttgttggtggaatacatccaatcccacttcagccacgtgatgtcgttgtcttggcagtaggcgttgttgttgccgtcctgcgtgttgcggaattcgtcgccggcgagcatcatcggcgtacccagcgagagcagcagcatgccgatcatgttcatggccgcctgttcgcgtgccgcaatgacgtctggatcatcggtgacgccttcgacgccgaaattggcggaatggttcaccgacgagccatcattattgttttcgccgttggcttcattgtgcttggagcggtatctggtgaggtccgtcagcgtgaaaccgtcgtggcaggacacgaaattgatggaggccggagcgccacgccctggttcggtggcgaacagatcggccgagccgcagagtcgcgtggacatctcctgcaaactgatacgcccgaaatcggagccgccgtccacatcctcaagccagaaggtgcgggccgtgtcgcggaagcggtcattccattcggcgaacggcacggagaattggccggtgcgccagccgaggttgcccagatcccacggctccataatgagcttcaggttgcccagcagcagatcggaacgcagggcgtagaggaacgggtgatgatgggtgaattcgccttccaggcgggccagcgtgacgccaaggtcgaagcggaaaccgtctatgccgatacgcttggcccagtatcgtaatgagtcgatggcaaaggtgaccacatgcgtgttggtgaagtccagcgtattgccgcagccggtggtgtcttcgagtcgaccggtattggatttttgatggcgatagtaggccaggtcgtcgaggccgcgccagcagaccgtcgggccttcgacgccgccttcgcatgtgtggttgtagaccacgtccatgatgacttcgaagccggcctcgtgcagtgcgcgcaccatgtctatgacttcttggcgcacggcggccgcgcccttctcctgggcggctttagtggcgtaggagggttcgggggcgaagtagctgagggtggagtagccccagtagttcttgcggccgtgttcttgcaggaagagctcgtcctgcttggccataatcggcagcagttcgatggatgtgatgcctagaccctgcagataggcgagcgtggtggggtgtgcgagtccggcgtacgtgccgcgcaatgattcgggcagccacggtgcgttggcggtgaagcctttgacgtgcatctcatagatgacggttttgcgccacggcacatgcgggtgctgcgggtcgccctcatgcttatgggtatcgcgatcgtcgatggccacggacaccggcatatggccgagcgagtctacggtgctcatggcaccgtatgccgagccgattaccttgcggtccacgacatcgcattcataggagaaggcggcgggggtgagctccatggagccgtcgatgcccttgccatacgggtcaagcaggaatttgtatggattgaagcgcacgccatgtttcgggtcccatgcgccgtccacgcggtagccatagcgcatgccgtcccatgctttgggcaggtgcacgtaccacaggccgtagttcggcccggtcatgcggaacaaggtctcgcgcagatacaaatgttcgatgatgcgcgtgcacaccgggaactcatgaatctgctggataaaggagatattcgggtcctcgaacagacggatggcgtcttggaagaaagcgctgggctcatcaatgggctccagcacgcacaaccaaacctgatcggcggtttcggaacgaacaacgacgtcagccccaccgtcgtcagtgaagtacagccctgggcgagtggcgtaacgatgcaacggtggatttctcataactccattgtagacgtgttgttacttttggtggaagcccttgatttccaaggcaacacgccgaatgaaagtagttttataaaaataatttgcaaaactgagataaagaagttatgctgttcatcaacacctcgcaaagacagcgagatgaacgaaaccaatacgcgaccaatcgccatgcagataggcctgccggccggtcacctggttacccagccacccggtcacccggcccaaccttgctcatcgcagtggcgcgctttcaccgtagaaaggacccatcatgaaggctcttgtgctcaccggcgtcaaggaattcgaaatccaggacctgcccactcctgaaatccagcccaacgaagtactgatcaacaccgcctacgccggcgtgtgcggcaccgatcacgacctgtacgccggccgccccggttcggccgccgccgtgccgccgatcgtgctcggccatgagaactccggcgtcgtggccgccatcggttccgaggtcactggtgtcaaggtgggcgaccgcgtggccgtcgatccgaacatctactgcggtcagtgtgagtactgcctgacccagcgtcccgaactgtgcgaccatctttccgccgtgggtgtcacgcgcgacggcggtcttgccgaacagttcaccgcgccggccaccgtagtctacaaactgccggacaacgtctcgctgaaggacgccgccgccatcgaacccatctcctgcgccgtgcacggcgtggacctgctgaagctgcgcccctaccagaaggcgctggtcatcggagacggcttcatgggccagctcttcgcccagatcgtgcaggcctacggcgtgcatcaggtggacctggccggcatcttcgatgagaagctcaagcgcaaccaggagctgttcggcgtcacgaacgtctacaacaccacgcgcgaggccattccggccgagtcctatgacgtgatcatcgaggccgtgggtttgccggccacccaggcgcaggccgtggccgccgccaagaagggcgcgcaggtgctcatgttcggcgtgggcccgcaggaggcgcacttcgagatgaacacctacgatatctataagaagcagctgaccattcagggctccttcatcaacccgctcaccttcaaagacgccatcagcctgctcgaatccggcaagatgaacgtcgcaccgctcatcagccacgaactgggactcgaagaagtccaggacttcctcgacggcaagatccagggcgtctccaaggccgtcgtcaaggtcggcgagtagtttcggcactttgccggctcctctccctgaggggagctggcggcggagccgactgaggggaggcatccggcggcgtgtattaccaccctccggtgctgcgcaccacctcccgccagtggaaggaagaggtttcgtctcacggttttcgccgccaatatagcttggccgccggctttccctttttcttccggcggccgcatttttccctgcaccacctctactgacaacgatgttgatggagtcaacccatgattcgcttttttgaaaaattcggtattccccgtgtgctgctgcttggcttcctcgccgttgccatcttcatgaccggcgacggattcgagctcaccttcctctccaaattcatggtcgaccaaggcttctcgtcctcgcaggcctccctgctggtcactgtgtacggcctgttcgcggccctcggcggctggtgcgccggcgtgctcgccgaaatgttcggtgcccgccgcatcatgatgttcggtgcctgctggtggatcggcatccacctgctgtttctcggggtcgccatcccgagtggtctgtattcgctgattctgggcctgtacgccttgcgcggcatcggctacccgctgttcatctacagcttcgtggtcctgatggcgcaatacatcagccccgcccgcctggcctccgccaccggcttcttctggacctgcttctctctgggcattggcgtgtttggcgcttacctgccgagcttcatcatgccggtgttcggcgaatacaagaccttctggttcgcactgccgttctccatcgtcggcaccgtcatgtgcttcttcttcgtaccaaagaacaaaatcgtcaaatcgcaaggactgagccgcaaggaacagctcgccgagctggccgagggtgccaccatcctggtcaccaatcgcaaggtgctcatctgcgcgatcatccgcatcatcaataacctgctgctctacgggttcccggtcatcatgccgttgtacctgtgcaccacccacaatggcggcatcaacatcttcaaaaccgaggaatggatgcgtatctggggcttcgtgttcgtgatcacgctgattttcaacacgttctggggctggttcatggaccgcttcggctgggtatggccgatgcgctggttcggctgcgcggtgctcgcggtcggctcggtggcgttctactacattccgcagtggttcggcgcgaatgccattatgatgatcgtcgcttcggtcatcgtcggcatcggcacctgcgcgttctcgtcgctgcccaccatcatgaccctgtacgcgggcggcaagcagggcgcggcgctgtccgcatacaacctcgccgccggtctgaccacgttcgccggccctggcatcgccaccattttgctgccaattgtgggctatgaaggtgtgtgctggacatacgccggcctatacgtgctcgccttcgtgcttaccttgttcatccgcccgcagcagcccggcttcgacgccaaaggccaccgcatcaaaggcgcaaaggttgcatccgcagagtcctccgagtcctcggaacctaccgacagcgcatccgtgcacgtttagctgcccgaagtaaccgtggccgccgaaatggttgccactgcgaactgatcgcaacatcatgttgcgtcagcaagaaagtatcgagaattgactaggagtgcggcatggttctgccgcgccgcataccttgtccgactatccttaacctttatccaaccaccacattcaaaggagaatcacatggctaagccaatgaccgcgttcactaccgacctccagcattccggcatgattgccaaagacctggatgagaccatcaagttctaccgcgaggttatgggctttgagctcgccggactgttcatgaatggcgagaaccgttgcgccttcctgcgctacggccacctgaccattgaaacctgggaaggcgaccccgccccgatgaccaccggcgccatcaaccactgggctttcgacaccccggacatcgaagccgccttcgagaacgccaaggcgctcggcgtggacttcaaggacaccgagatccagtccatcccgagtttctggaagcatggcatccgctacttcaacatctacggccccaacggcgagaccatcgaattctgccagattgtggaggagtagtggctccgatgcgcccgattcgcgcgcaatatgcgtgtcgatagtggccgcaatataatactcagcctttattacgggctggtctaataactaacattcaacgaccggtgcacatgcgccggtcgtttttttagtgcctgatgattgtgctgggttacaacaatgagcggcacgctgggcataacaacatccatgcaagaaagtatcaattcttgactgttttcgcgccaaaacactgctattttcgcagcgaaacttgtattaacgctccaaagttgggcggatgaaaacaacgaagtttgcgtagtaaaaggagacggtcatggcacaaggactggcgcgaaaactactgccgggattcttggcgatcgcagtgttcatgacaggcgatgggtttgaactgacctttttgtccaagtatgtcgtcgatcagggattcagctcgtcgcaggcatcactgctgtttacgatgtacggattggtcgcggcgctcgccggctggtcctcgggcgtgctggccgaactgttcggagccaagcgcatcatgcttattggcgcgggttcttggatcgtgctgcatctggtattcatcggtgtggcattgcctagccacagttattcgctgatgctggcgtcgtatatgttgcgaggcatgggctatccgctatttatctacagcttcgtagtgttgcttgcgcaaactgtggatcccggcaaactggcatcggccatgggctggttctggacttcctattcctttggcatcggtgtgtttggcgcctatctgccggcgttcatcacgccggtgattggtgaatactattcgctgtgggtgtcactgccgttctcgattgtcggcatgattatctgtctgtgttttgtgccgaaaacccgtaacgccaatcttgacacgatgagctcttcggataagcttcgtgaactctctcgcggcgtgaccattctcaaagacaaccaccagattgcgcttgctgccgtattgcgtgtgatttgcaatctcactttgtacggttttccggtcattatgccgctgtatctcgccacgcatacaaacggcggcggagcttggtaccaggtcaccgaatggtccaccatctggggtctgctgttcgtcgtcaccgtattcggcaatgtgttctggggccgtatgggcgattgcttcggctggatgagccagatgcgctggtggggctgctggctctccgcgctcggtactctcgccatgtactatgtgccgcagctgtttgggcacaacctgccatttatgtatgtgtgcgccgtggtgctcggcatgggtatttccgctttcgtaccgatgggcgcagtattccctgctctggaacctgagcacaagggcgctgcggtttccgcacataacctcgcttcaggcctgaccacattctgtggtccgttcatcgccacggtactgctcaataccgtaggttttgccggagtgtgctgggcatatgccatttgctacatctctggctcggtcatctcattctggattcgccccgagcagccgggcatcacccgcaaagtggcggcgaactgagcggtgctcgctgactgttctcgtcaaaaaccaacaatacaagaccctcaaaaaaataaattcaaccaatataaggagaaataccatgaaagcagttgttctcgaagagcagggcgtcatcaatgtgcgtgaggtcccggacgtcaaggatcccggccccggtgagctgcgtatcgcaccccacaccgtgggcgtatgcggttctgatttgcattactacacgcacggtcgtgttggcaagtatgttgttgagcagccaatgattctcggccatgaggcagcgggcaccgtgttggaggtcggccccggcgtcactgatttcaagcccggtgaccgagtcgccctcgagccaggcattccggatatgacttcgcgggccagccgactgggcatgtacaacgtcgatccggctgtgcgtttcttcgctactccgccgattgacggttgcctgtgtgaggaggtcattcacccggccgcattcacctaccatctgcctgattccatgagctttggcgaaggtgcgttgcttgagccgaccgccgtgggcatgtgggctgccaccaaggcgcgcatcaagcccggcgatgtgtgcgtggtgaccggctcgggcacagtgggtatgctcactgcctctgctgcgctcgccggtggcgcttccaaggtgcttgtttcggatgtgtcttccatcaagctgggtattatcggccagattccgggcgttatccccgtggatttgacgacggaggacttggttgaacgtgtacgcgaagagaccgctgggtggggcgctgatgtggcattcgagtgttccggcgcgccgaaagcttatgagacgttctggaagctgattgccccgggcggttgcgcggtgctcgtcggtattccggtcaacccggtaccgattgacgtgaccgagctgcaggccaccgaagtgcgtattgagaacatcttccgttacgccaatgtgtaccagaaagccatcgatttggtcgatagcggccgacttaacctgaagccgttcatcactgacacgtttgccatgaaggacgccaaggctgccttcgaccgtatggatgagggtcgtccgggcgatatcaaattgcagattacggtcaatcgagactaatctgtgacgtgttgatgacgagatgattgcccgatgaaatcctgcggcatatgttggcgtttccctttttccgcccgcacttatgtgccatatccgtaggattccggcgggcaatcatctcgccgtagttgttccatcggtaaagtacgaaatatggcgagctgtactgcgcaacgttgacaaggaggtctgcgatggatgcgcgaaacttgactgcgattcctcattcggatgcgggctcgctggaagtgattgtgcccgatggggatgcggccatacgttggtcaagccacgggtatccgagctctctggccaaatggcattatcatccacaaatcgaaattcatcttatccgtgagggaagtggacaactcatggcgggggatggactcatgccattcgtgccggggcatgtggcgatgatcggatccaatctgcctcataattggttgtcggatatcattcctggagaacggctctctcatcgtgatgtgttatgccatatacgtccgcagactatgcgactattgaccgccgcttttcccgagacttccggtttcgagacggtattgcgccgttcgcagcatgcacttgtgctgttcggtgattcggcacgtgaggccggcgagctattagtggccatgggagaacatagtccagttagacgggttgccgatcttattgctattctgacggtattcgagcaggcatcagcgcaggaaagccagaccgtggtaacgccggaatacaatccagagattgcggttggcgcggaggatgggatcaacgccgccatcacctatatttccacacatctggatgaggtcagcttgcaaggtgccgctgatgcggcggcgatgagcgtatccaccttttctcgcttcttcaagcgagttgccggcatcggttttgctgattttgttcgacggcttcgagtggggcgtgcttgtcgtttgctgacttgtacaaacatgcccattgccaagattcaacagttgagcggatatacgaatgcctcgaatttcaatcgtcggtttctggaagaaaccggtatgactccatctcaatatcgccgagaacattgattgccgccccggtctgggcggtgtcacggatccgtgcaagaaagtaccataagtgggtttcttggtatcagatagggccaatgctgccgtttaggcttgaaaatacaacgaagtggttagatgcgcataaagtgcatcggctccaaggaggcagcaatgaatgataattcggtatggccggtagtgactgcggtaatggtcgtgcttgcggtggccgtatgcctggccatggctggtgacatccggtttgccgtgattggtgttctatgactgtctccatgagtcccgaaaccgctgccgcctaggcggaaatcagccgcgtaccgcagcaccacagatatcgtcgagataattctcggcgaatcgcaatgcggcaccgatgatgttctggtcttcggcgcagtagctcttgcgcagattgaaatggtcggtgccgaacgggctgcgtgcgatgacgcgcgccttcagatcctcgatgtcgctgtcttcaagatgctgggctgcttcaccgccgacaatcacgtcgcccgcgatgatggatcgcgcgttgacgatggcctgcgccacgtaatccagccactcatccatgcgctcgcgatgatgccgttcgccctgctcaagcacgctgaagaagccgggaatactttcgtaatcctcgggcaaggtctccggcgagcagtaggtgtccatgcagccgcgctggccgcagtagcattcgcgaccgcccggtaccagcgtcatatgttcgatggcgccattgcactggttcgggccctgatacagcttgcctcccacaatcaccgcgccgcctgggcgtcgctccagatagacacacaccgcatcggtgagcgtggagtcgaaccagagttcggccatggctgaggcatcggaatcgtggatcatcatgcacgggtaatggaccgattggctgatggtttcgagcgtgagcccagtgttgcccataatggtgccgaaggtgatggtggtggcgtcaggggagaggatgccttggatggcgaacgagacgccgagcaccttgccgtgcttcttttcgacgtcggcggcgaagttgttgatgatgccgccgatacgctggtagtaaacgttggtgttgcggtaaggcagggcatcgttgcgtttttcgatgacgttgccgtacaggttaatcgcgcacaggcgcagttcgttggaccgcatcactaccccgatggcagtgcgatgatcgggattgaactcataattttgcgccttgcgcccgccggtggaatcctgcagttcgcctttgcggatgagtccgtcatcttctagggcgcgcagattttgggtgatggtgggcaggctgaggccgagctcgcgttccagttcctgcttggtgacatggctatggccatacagatactgggtcatggcactgcggttgtgcgctttcactgcagttgatggcattgccctcatatttgcccctttgtgcgatgagatatatgcaagtatactttatgaaagtggctttcatgtgcctcgacgcggagattgtgagacaaaaatcgtatatttgtaggcgatttgggtacttttttaaaccaattttctagaaatgtggagaaaatgagtacttttggaaacttgatttaaaaaaattgtcggattgcgttgtttgcaggcatgtgattttcggtaaaaagtgaacaaaaagtaccaaatcgccgaataaagtgagaatttgttcgatatttcgcacaactcgtaacaaaaactgttcaatatcgcacgtgaaacgccgtcgattttgtgcgtatgcatcgcgccggaccgttcagtatattgtgcctcaggtcacatatgcaatgtgacaacgcatcaccggtcattttcggttactgaggcggtatcccgctggtgcaactgaggtgacgaggcgatggcccagaactttgccatataccccaagaagatcgaggaggaccccaagtggcagaagcaaagaagaaggtcgaagctaccaagccgactccagaagagaagcaggccgcagctgaggccgaagttgacgcgctggttgcccgcgccaagaaggctctcgtcgaattcgagaacctcgaccagaagcaagttgatcgtatcgtcgccaaggcctccatcgccgctctgaacaagcacctcgttctcgccaagatggctgtcgacgagaccggccgtggtctcgtggaagacaaggctaccaagaacatcttcgcctgtgagcacgtcaccaactacttggccggccagaagaccgtcggcatcatccgtgaagacgacgtgatgggcatcgatgaggtcgccgagcccgtcggcgtggtcgccggtgtcaccccggttaccaacccgacctccaccgccatcttcaagtccctcatcgccctgaagacccgttgcccgatcgtcttcggcttccaccccggcgcgcagaagtgctccgtcgaggccgccaagattgtgcgcgacgccgccatcgaggccggtgctcccgagaactgtatccagtggatcgagcacccgtccatccaggccaccggcgcgctgatgcagcacccgggcgtggccacgatcctcgccaccggtggtccgggcatggtcaaggccgcttactcctccggcaagcccgccctcggcgtgggtgccggcaacgccccggcctatgttgattccgatgtggacatcgtgcgtgccgccaacgatctggtgctctccaagcacttcgattacggcatgatctgcgccaccgagcaggccatcatcgcccacaaggacgtctacgaccagctcatcaaggagctcaaggtccgtaaggcctacttcgtcaacgccgaagagaaggccaagctggaacagtacatgttcggctgcactgccggttccggcgtcaagcccgtgctgaactccgcggtgccgggcaagtcccctcagttcatcgccaaggctgctggcttcgagattccggccgacgccaccattctggccgccgagtgcaaggaagtctccgacgacgagccgctgacccacgagaagctcgctccggtgcaggccgtgctcaaggccgacaacaaggagcaggccttcgagatgtgcgagaagatgctcaagctgggtgccggccacaccgccgccatccacaccaacaaccaggagctcgtgcgtgagtacggcgtccgtatgcacgcctgccgcatcatctggaaccagccttcctccctcggcggcatcggcgacatctacaacgccatcgccccgtcgctgaccctgggctgcggctcctacggcggcaactcggtgtccggcaacgtgcaggccgtgaatctcgttaacatcaagcgcattgctcggaggaacaacaacatgcagtggttcaagatcccggccaagacctacttcgagccgaacgccatcaagtacctgcgcgacatgtacggcatcgagaaggccgtcatcgtgtgcgataaggtcatggagcagctcggcattgtcgacaagatcatcgaccagctgcgcgcccgctctaaccgtgtgaccttccgcatcatcgactacgtcgagccggagccctccgtcgagaccgtcgaaaagggcgctgagatgatgcgcgaggagttcgagccggacacgatcatcgcggttggcggcggctccccgatggatgcctccaagattatgtggctgctctacgagcacccggaaatcgccttctccgacgtgcgcgagaagttcttcgatatccgtaagcgcgccttcaagatcccgccgctgggcaagaaggccaagctggtgtgcatcccgacctcctccggcaccggttccgaggtcaccccgttcgccgtgatcaccgatcacaagaccggctacaagtacccgatcaccgactacgcgctgaccccgtccgtggccatcgtggacccggtgctggctcgcacccagccgcgcaagctggcctccgacgccggcttcgacgccctgacccactcgatggaagcctacgtgtccgtgtacgcgaacgacttcaccgacggcatggccctgcacgcggccaagctcatctgggacaacctggctgagtccgtcaatggcgagcccggcctggccaagaccaacgctcaggagaagatgcacaacgccgccaccatggccggcatggcattcggctccgcgttcctcggcatgtgccacggcatggcccacaccatcggtgccctgtgccacatcgcccacggccgtaccaactccatcctgctgccgtacgtgattcgttacaacggccagattcctgaggagcccacttcttggccgaagtacaacaagtacatcgccccggaacgctaccaggatatcgcccgcaacctcggcatcgacaccggcaagaccccggccgaagccgtggagaacctggcgaaggccgtcgaggactaccgtgacaacaagctcggcatgaacaagagcttccaggattgcggtgtggacgaggactacttctggtccgtgctcgatcagatcggcatgcgcgcctacgaggaccagtgcaccccggccaacccgcgcatcccgctgatcaacgacatgaaggacatcgccgtcggtgcttactacggtgtctcccaggcggaaggccacaagctgcgcatcgagcgcgagggtgaggccgccactgaggaagcctccgagcgttgattgcaggcggtttgtggttggtggcaccatcagtagccaccaaccgcggtgttgcagcttagtgtctgcatagcgcgacacaaggagcccgaccccattacaggggccgggctcctttgcatatgtggtgctccctcagccagcaggtacacc

SEQ ID NO: 704 - DNA, 28480 bp, Bifidobacterium longum
  source 1..28480: mol_type = genomic DNA
gtccaaaccgatgaatttcattttgctgcggccaccacgccaactgtgcaatgaaatccaaatattggcgataaaaggaatcagcagaatcaccacggtaccgatggcaccgggaacaatgtaacggccataaccgctacgaatacgcttttcatatattttctcgttattggaaagctgcttcttctgccgctttccttgagatgagccgttgccatgagacatggtctcctccttttgtcaatggacaccgacgatatgggatgcgggctggcgacagtgccagctctgtacatgagtgcgaatgtgtcaggcacggtgtgggaagatgatcaacaatgaacatccatcccacaccatgccacactacgtggctttatcgtgtagtcgaagagacaggaactcgttacagtcccagatctgactttccttcctcataagcagccttgatttcaccggttgcctgctcaggagtggagttgccgttaatcaagccttggagagccgaattcagagcatcatacatgccggcacttggccaatccgggtacaacgcaatcgcatcgttgtcgagcaactgttcgaacaccgtgttgaactctttgacagagtcctgcatgtcatcgaaagtcttcagcggattcttaagctcatccggcaaagagtcaatcgagtaatcatcagaggcattgaacggcaaaccagcttcagtagcaagcatgttctgcacatctttggagagcaggaagttcaggaagtcggcagcaagatccttatgcttagaggtttccggaaccacccatagtttgccggttgcaccggtgttcagcttctcgttgccgggcaaggcacggaacgtgctcttgaagttgccatcctgattgacacgtccgaaccaccacgagccagagaacatgattgggtattcacctgcacagaactgtgtaatcatatcctcagcgaccagaccaccggagttgctcggaagatatcccttctggacccactcggagaacttgttcgcagcataggtgaatggctcactggagaagtcgacgtcgtgctcataggattgataatcgtcaacaaactggcgattggccttagacagtaccagctgataccacagatgctgcgaagccgtctcattgccttcaaaagcaaccggcgtaatgcctttgtccacgaactgctgcatagcggactcaagctcgtcgaaggtttccggaatagcgatgccatttttatcgaacatgtcctggttgtagtacgccagaacgaactcaccgttgattggcacgccataccattcgccgtccgaggacataacgccaccatcatcggccttatatttggccacagtctgaatggattcaggcaacgtatcggtccaaccatatttgtccgcatattcgcttaagtcagccagaataccttgcgatgcgagattgccaacagaactggtcccctggttgtacatggccacgtcaggagcatcgtcagcctgcagagtcaacgatgcattcttctgcatctgcgggaatgaagtgtggacttcattgatcttgacatctggattttccttcttgtacagcttgatggcacgctcccacgtgtcaccaccgccagaggagtaataccaagaaatcgtgagttccttttcatcggactgggccgtgtcgctgccgccacatgcggcaagggaagtcagcatcaccattgaactgactgcggcaaccgcacttctgaaggggtgcttcatgttctttctccttatcattgctgccagcgcggtgttgcgcaggcaaatcttgttgttatttggtggaatccggcatatcaatcgcatacactctggcactgcgacgattgtcggaaacagtcagacggacatgtgtgccatcaagaggctcgacatgccaatcgactgcaccatggctcttgtcgatgagtcccggcttcgggaaaaacggtctcaaagtggcaccttgcggcacttctacaacaacgctgtttgcaccgccgcggtgccaaatcgtcatatagccggtctcgttattatccgcataaggcaaaagcccactggccaaccaatcgcccgaaaaaaccggaagtcccaatggccagaatggcacctgaccggactggttcctcagcacctgccggtgcgcttcaatggcacctcggaccagacgcaagcgcctctcatccattcggttgacgaaacctgacagatacagacgaccggcgatacctgctgcaagagtgaaaaccgcagtctcgtcatccatctcctgctgagcgtagccccaattgccttgttgctccggcagaatcgacattgaggctccagctgcaatggcagcatatatagccggatcacattggtcagaagtcgattgcagatcgagacgttgcagcatcgcgtagtcagcacgcatggcaccggaaccacaattctcaatgacaagctcgggatgccggtgcttgagatcgtctagccaccgcacataagcacggctatgaccaagcaacccttcacctagatatccggcatcgatttcggtaccaaccccgggtacggtgttgtagtcgaatttaaagaatttcggctggaattcagcgatgatgcgctccatcgtgtcatccatatgagcgcgcgcatcaggagaacggaaatcgagatggtaacgtccatcgtctgccacgcgctcgccatgccggcagaagaatgcggaatccggcaactcattagcaattggagaacgtactcctacgacttccggctcgagccatagtcccagtcccatgccggccttgcggatggccgaagcgattcctttcaagccaagattgccgaaacgattggtagagggcttccactcgccaaccatgtcccaccagccgccatcggcgctgtcataccatccagcatcgatgcagaacacgtccacgccgagcttgcctgcaccttcaattagcggcagttctttatcagccgtcggattgccgaacagggtattcatatagtcgttgtaaatgaccagctgttcggaatcatggttctgaccgtttacagccaaacgagcagagcgcaatgcccgacgatgtaacgtcatttgttcgactacctgctgccagccgcctgagcaaatggcaaagctagctggaactgtgacaaaatcagtgcgttcgtcaagcacaacggcccattgatgatcatccccattaggaccgccggccgtgatatgaaggccatcgatgccttcaccaatttcccaagtccatggaccgttgtgttcgatttgccaaatcagagccgagcgacgaatcccctcccccatggttaaaacgccaaggggaagcttctctccagtcgaccaagtggatcgcgaagagagattaaatcgtgcgcccggaacacgaggattaatgttggtattgatgtccggcaaaccaatctcgcgaagtggcgcctgatgccaattattttccgcggcccatgtgctgtcggcccagtagacctcgactccgtcaactccacccccagcggcatccaacggcacggtgagattcaacgaagacactgcttctaccggcagccggcgttccgatgcgatgcgggactggcaactcacggcactgactccggggaacatcgagaactccgtctcagtcaacaggccagaatgttcatctttctgatcaatcctgagaacatgacgcatgccgcgctcataggtataagctgctacaaaacggagctgacttccttcccgagtatcggtcaagcgttgatgattcatggtacgacccgagatagaagtaagtacttccacaatgggaaacgcacctttctcgttgttcaattcgcaggcaggacgcataccatatccggacaaaccggcgagcacaaccggagcattatcgcgaactacgaataccatgcagatgtcatcgttatgccagatcaatcgtccatcagcatcgacaatctctgttcgtccctcacatggagtgaattggctgcaattcatgtgacgctcctccccttatctcgtacctatatttcgatgttcacccgttcaaatcaccgcacatgcacggcagtccaagacaccggaggcaatgtcacatgtacgatggcatcgtcggcactgaacgtaacagaatcattggtgtgaagaatcacgcgatcttggttttccaaggtgttcctagcgagcaagtcctcttcatgtagcgtctgtgcggtcgcttcagtgaagttgccatcatccggcacttggatttcgaagtcattggacaattccaatgaccgattgaccacgaaaatggtcacagatccatcggccccgcgtactgccacagagttgaccaccggtacctctccatacttggccgtggcataagtattcgaagtcagtttgggctcaagtaccgtaccgttcttggcatatctcgcagtcatcgagaatggatagaacgtcgtctggcgccatgccggacctcctggctcggtcataattggcgcaatgacattgactagctgagcaaggctcgccgcatgaacgcgatcggcgtttttgagcaacgtaatcatgaggtcgccaaagaccacggcatccgcagcggtgtagctatcttcaagcagacggggcgccacaggccaattaccaataccttccggatttttgcttggttcttcatcgatataccacacgttccattcatcaaatgagatgaatacgttatggtcgctcttaaggcgagccttggtagcgtcgatggcggcagcgacatccttgatgaagccatccatatcaacgccggatgcaaggaagcttgccatatcacgagtgccatcagcctgaaattcaggatgataataggcatgacacgagatgaaatcgacactgtcataggccttttcaagaaccgtttcttcccatttaccaaatgtgtccatcatgtgactggatgatccacatacgaccagctccacatccggatcaatcatgcgcatacccgccgcaaccgaggcagccaatgtaccgtagtcttcggctgatttgtgcccagtctgccaggggccatccatctcattgccaaggcaccacatcttgataccgaacgggttttccttgccattggcacgtcgttcatcagagagcttagtaccgctaggaacattcgcgtactcaagcaaatcgagagcttcctcaagaccacgggtgccaagattcacagcttccatgagctcattgccgccgaccttgtctaaccactgagacatctcgtgcaagccgaactgattggtttcagtggaatgccaagccaaatcaagacgacgcggacggctttccttcgggccgacaccatcttcccagcgataaccggacacaaaattgccgccgggataacgtatggtagtggcacctaactcacgaaccagctcaatgacatctttgcggaatccatcctcatccgcttcgggatgactaggctcatagatgccgtcatatacacaacgtcccaaatgttccacaaacgagccaaaaagacgatcattcaccggagccacttcgaaggcatcgtcgacgatcagacgggaggaatctgaggcggtgttggactgctgctctgccattgttatcctttgcttccataaattcgatacaacgttgtctcagataagtaaaaatcaccgcttcagcgcggaagataattactgagtacaacttgatacaacatcgtacctatcatttagttagatgatacaacaaagaaccaaatcatgcaacgacgaggcgcaaaacatctgcataagcgtgtattttcaaggcaacacgccgaaaagaatcgggccaaaagacagaaaaaagaacgtgtaaagcgccactcgccactcacatacttcaacaaatacaaataacagcaaccacaattgatacaacgctatatcatcatccgaatcaaatccatccaacaactgccgcggtcaaaatacctagcgaggaaacatcatgctttaacgaccgttacataagcagtcttagcaagaggtaacggccagaggccacgcacgttggaccgcgcgcatccgtcatatagacaatcacagtgcgtttgctcacggtcagactaccgcgcatcatgatacgattcgtcccgtaacctttggttaggggcacgaccccgtaatcaacgcaagggcccgacgttagcgcgtcggacccttttatcgcccatcatcaatctcatcgaaacccggaactagtgtatgagcaaaaaactggtcggttcgggagacagtaccgagtaatcactcaattgacgaatcgcgggaccgctaccgtaggacttttccgatgccttatgatgccgaaatgcatgcaacgtatttcctagccggttcccgatcatgaggccgcatgcataagaggaccatttaaagctcctgaaccgcccttcccgcttcccgtccgcagattgcctcgcatttctgcgctatttacggacccaaattgcatgcacaagacgtcgatttctgcaattacatgcatacaggcgctagttataggcgttctcgggtcataactggcccttcgcatttgggtgtgtatgggccgtgcgtttttattcggtgtgtgatcgaaaaagcgaagaaaaccgcgcagcttggttccaagtctagcgcgttcgacggccgggtgctgctcggtctggacaggctcgggttgaacccggtctcgcaacgccacgtcacgtcgggctcgtgtgccggcgtgtggctgatcggctgcgatccgacggacgagaccgaccggtgctgcagcgaatgcggggccgcggggcgggtccgctcctcgtggcggcgccgtttgtatttagtcaagtcgatgtttcgtgtttcgtcactgattttttttggctgtgaaaaacactgccgaacccgcccaacaaacattgaagcaatacaggcaccagcatcgactggaacgagttccacacacgggtcgaatggcagtcgaacgactagaccgccggacacacattttggcctataactccattttggcctatagccccaaaggtggggtttcgcagaaacaaaaagggtttcgaggtgacctcgaaacccttgcaggcggataaggcgagattcgaactcgcggaggctttcacctcacacgctttcgaggcgtgctccttagaccgctcggacacttatccatgctgccaaaatggcaacttgttcattatgccacattctgccgacctggcaaatcggagtttcgctgagctcgattcggcgtgggataatgcgattttgtgtgagattgcaatgggtcagacgatgagccgattaacagtccgaattggtcaactgcgaaaatccgaattcttcaactaccaaaatccgaatattggtggtggtagaagcggtgacggggccactctgcattgagtggtctctccctcggtcagccttacggctgacagctcgaacgcaattaaggacagctttccagctgccattttatttgctcactgtcgttcgccttcgcctaaaaacgcctccggcgttttcttcacggctcagctcatcagagggggcttggaattttatttatgccacctgttcgtggacggaggcgttgacccattgggactgctggacgttgtagccggagaagatgccgatgtcgagcatgcagtcgcggtaatcgcggccgtgggcgatggtgatgtagctgtcgtccaccaatcggttatgcgtgggatccagtccgacccatcggccatcctgatacacctcgacccaagcatgggtcgcgccctctcccccaagcaaaccggcaatgtagcgcgcggtcaatcccacatgccggcacacggacagcatcacgtgcgcataatcctggcatacgcccttgcgctgagccaaggcctgttcggcggtggtgcgaatcgtggtggaaccgggcgtatacacaaacgccttgtagacctcatccatcacttcggcagcctgctgcaccggagtggcgtcggaaggcagcgccgccaagcgttcgcggcatacggcaatcatcgcctccacgttcgggccgggaatggtgagcgctgaattgaatcggtacagcggtttataggcttccttatggatatgcgcattgtccacgaaggcgataccggtcaccgagtagctgaatatgtcgtgcggctcagggatgaatccggtcatcaccacggagtcaaaggagtcgatggtggtttcgagttcggtttcgggctgaatcttcacttccacgtcaatcacctgttggcgagggccagtggagggaatacagcgaagctggaacctgtgatcggtgaccggtgcgctgaaggacagcctcatctcatagtcgaacacgagttttttcacaacgtctcctgcacttacacacgagccggcaaccggcatattctcgggataacaacactacagccatggctgaggtatggtccgtgcgctcacagcccacgcatatattccggcaatctgctgatatgcacaggccggcactcgggcgcacggttttttcgccataccaccatagcatttgaacccgtcagggtgtcaggtcgggatcagggacgcttggcgtccatgttcatggagctcagtgagcccatgtctttgatggccagcgcgctgacacggccggagtagtcgtcaaggtacttcttcagcaggtcggcgacttcctgatatccgcgagacggcagctgaccgaccagccagctcagtccgtcggcgaagcagctgggcagcggcatgccgtccaaggtcatcgaataggcggcgagcttcttgagcggcgcttccagatcctccatcgtcaggccgaagcgcgtgtacaggtcgatgcgttccagatatttgccgatgaagatgaacgccttcagcgtggggtcgaccggcgaattctcgatgccgccccagaaagcgagcatgtcatcggtaatatcgcgctgcttgtagatgtcctcggcatcggccgcgtatttggcggcatcggtgatattggtcatcgccaactccacgtactgcagcagacgcgagctcaattccgggcgcagaatcacggcgttgttgaatgcggaagttacggccgaccgcaccgaatcaggattggacccgtcgtacaggaagctgttcacgaacccgtcgaagtcctcgaaatcttcgggcaggtcgagtgcgtgagcgaacggacggaaggcgtccacatcggtgtccatcacacgatcgtagaacgggaagaactggttcagcgtggtgaaggcgcgctcggtgtatcgacccagccaatacaggttgtctgccttggaagcggtaaccagcgacaacgaatggtggcgggactggctcagcaggttcgccacctgcgtttcggcaccgtactcgtgctccacgccggattcgggtgccaacacccacgtatccttaaatccgccaccctgcgacgagttgacaatcatctggccgggcaccgacgagtatcgagtcaagcccgaataccacacgtgcgtattcttgccggtgaccacgaaggcacgcaaatcgcacttgcgcggcgacatctcgccggtcttcgggtccaccacatcgatatcacggaactgaatcacctcttgggcaatgaatcgacgcggctcctccttgatccggttggcgagctcctcacgtgcggcggcatccagcgacgaaccaaacaccacgccgtaaccgccggcttcggccacatccttgatgaccagctcgcccatccgattcaggacttccttgcggtcggcctcgaacatcggcatgtacgtgggcgcgttgttgagaatcggttcctcgccgagatagtacttgatcatctgcggcacgaagtagtagacggccttgtcatcggccgcgccgttgcccggcgcgttgacgatggccacgttgcccgcgcggtaggcggacaggataccgggcacaccgatcaccgaatcaggattgaaggcgaacgggtcgaggaattcgtcggacaggcggcggtaaaccacgcccacacggtggcgtttgccggcgtagtcgaggaagtagaccttgttgtccaccacttcgaggtcttcggggaaggccaacgccgcaccggttttctccgccagataggcgtgctcgaagaacgcggaattgtagcggccgggagtcagtaccacggcgatgccctcggtggagacaaagtccatggctttgcgcaacaggcgcgggtattcgcgattatcgcgaatacgaacgtcgcggaacaggcgcggggagatgcggcgctcgatgtcgcgcacgaacagcgggtagctggcacccgaggggatgcgcaggttgtcttccagcacccaccagcggccgtcctcgccttggaccaggtcctcgccggcgatatgcgcgaaaatgccgccgggaggggtcacaccgttgacctgcgggaagtagccggccgaggtgtatacgtattcttccggcacgacgccatcatgaataatgcgcttatcggaataaatgtccttcagataggcgttcagggcgttgacgcgctgcttcaggcccttctccaattcgtcgtattcgtcggattcgataatgcgcggcacagggtcgtacgggaacagccggtcatggtattcgccgttcttgtagatgccgaaacgcacaccgttgcgggacagctctcgattgatcgcttcgcgacggtttaccagttcatgggccagtctgcgtgctgcggattcgatcatcgtgcctgctccttgctgtggcggcttctgtggcttcaagcggttaggcgtgttgagcgcacgctgacgccgcaagccgtaaccgggtttgatggtttcaacctaaggcgggcccgtttcaacaaacgcgcgagaatgttacaggcaggtcactttgacgaccgcgcgcatcttgccgaccgcactcgtctcgccgaccgcactcgttacaatgaatggctatgacacgactgcgcattgacttggcctacgacggcggcggattctatggctgggccaaacagcccaatcttcgtacggtgcaaggcaccattgaagatgcgctgcacaaggtgctgcgggtgccggccgatgacgcggccgaaccgttacgcttgacggtggctggacgcaccgacaccggtgtacatgcctcccaccaagtggcgcatctggatgtatccgatgaggtactgaatcgctgcgtaggtcacatgaccattccggtcaccgaggcgctgactcgcagactcaaggctgtgctgccttcggacatcgtcattcatggcattgccgtagctccggtcggcttcgatgccaggttctccgcattggagcgcacttatgtgtatcgggtcgccgatcgttcgtctgaggtcgacccgcgcctgcgtggatgcgtgcttaccgtggatgaagcgctggatctggagcttatgaaccgcgcagcctcattgaccatcggcctgcacgattttggttccttcgccactccgaatccgggaggcactacgatccgtgaagtcaagaccgcctattggcggcgggtgccgatcactcccctagtaccggatgagatggcatcgcatgaagcatatcggactccgtcgctggagtccggcctggtagtgttcacgattgtggcggacgcctttgcccgcaatatggtgcgctccctggtcggctcatgcatcaaagttggttcgggacgcaaatcactggagtggtttgccggcaaaatggccgagccagtacgtgaaggctcaagcgggccgattgcgccgcagggcctgactttggagcatatcgcatatcccgccgatgatcagctggccgcaagagccgaggccattcgggccgtacgtacgttgtagattctatgaaaacaacgcaaaagggctggaacccaaacggattccagccctttcagctagcttagcgaaacgctattcagctcactcggccttctcggcgtcagcggcttcctcagcgggagcctcagcctcagcggcggcggtctcctcgaccggagcctcaacagcctcagcagcctcagtggcctcagcctcaacggccggagcttcttcttcggcaaccttggcggcggcttcagcttccttcacaacagccttcttggcaaccggctcggtgacgagctcgatcacagcggccggagcggcatcgccaacgcgcggagcgatcttgacgatacgggtgtagccaccttcacgctgctccatctgctcggcaatctgggtgaacaggatgtgcaccacggacttgttgcggatgacgcgcatcacgcgacggcgggagtgcagatcaccacgcttggcgaaggtgatcaggcgctctgccagcggacgaaggcgcttggccttcggcagcgtggtggtgatgcggccgttctggaacaggctggtcgccatgtttgccagcatgaggcgctcgtgtgcggggctggaagccagacgcgggcccttcttaggtgtaggcattgggtttactccttatatgtccgttcttcaggcaagcaggtgggcatatgcccgaacatctgcttgcctagtgaacgaacgattggtcaaagaggcagatcactcgtcttccggcgagaagaacgtgccaccttcgagattattggtatcgaaggccatcggcgaggacttgaggctcaggcccaaggtctgcagcttctccttgacctcatcgattgacttcataccgaaattgcggatgtcgagcaggtcctgctcggtgtgggagacaagctcaccgatggtgtggatgccctcgcgcttgaggcagttgtaagaacgctgcgtcaggttgaggtcctcaatcggaacggccatctcggggttggtctcctcggccaccggggccggaccgacctcgacgccttcagcctgggcgttgagctcacggcacaggccgaagagctccaccaaggtggaaccggcggaagccaccgcgtcacgcggggagatggcgggcttggtctccacgtccaggatgagcttgtcgaagtccgtgcgctgttccacacgggtggcctcgaccttgtagctcaccttgagtaccggggagtagatggaatcaaccggaatacggccgatctcatcgttgtcctgcttgttcatctgggcaggaacatagccacggccacgctcgacagtgaactcgatctcgagttcgccatcgtcggcgagggtagcgatgtgctgctctgggttggcaatggtgacgccggccggcggggtgatgtccccagccacggcttcgcccttgccgctcttgcgcagatacatgaccacaggctcgtcgtattcgctggtgagcacgatgcccttgatgttcagcaggatctcggtgacgtcttcctggacacctggcagagtggtgaactcatgcagggcaccggaaatacgcacggaggtcacggcagcacccgggatggagctcagcagcgtgcgacgcagcgagttgccgagcgtgtagccgaagccaggctcgagcggctcgatggtgaagcgggagcgctgcggattcagagattcctcggtaagagtcggacgctgtgcaataagcactgtggttatcctttcagcttgaactcggtggtgcactcaccggtcaggcggttttggatggatttggtattgctgagtgctcagacgcgacgacgcttcggaggacgaacgccgttgtgggcttgcggggtgacgtcggtgatggaaccaacctcgaggcccgcagactgcagggaacggatggcggtttcacgaccggaacccgggcccttgacgaacacgtcgaccttcttgacgccgtgttccatcgccttgcgggcggcggactcggcagccataccagcggcgtacggcgtggacttacgggagcccttgaagccgacatcgccaccggacgcccaggacaccacggcgccggacggatcggtgatcgaaatgatcgtgttgttgaaagtggacttgatgtgagcctggccgaccgggaccgacttgcggtcgcgacgacggggcttacgagcggcttgcttaggcgctgccattgaccctcgtttcctagtaacgaactttgttgttgacgttcgggcgatgggatgaaaatcatcccgtggcccgaatcatgccaccgactacttggtggccttcttctttccggcgaccgtgcgcttcgggcccttgcgggtacgagcattggtcttggtgcgctggccgcgcacaggaagtcccttacggtgacgctggccttggtagcagttgatctgaatcttgcgacgaatatctgcatcgacttcacgacgcaggtcaccctcgatcttgtagttggcttcgaggtagtcacgcagcgtaatcagctgctcgtcggtgagatccttgacgcggatgtccgggctaataccggtcgcggcaagcgtttccttggcacgagtgcgacccacaccgaaaatgtaggtgagggcgatctcgatgcgcttctcattggggatgtcgactccggcaagacgtgccattgcgattccttcttgttgccgtaggtcttgcacccgctcgcccggttacccggcacgggcctacgtacccgtggttcagtgtcgttcccttgcgggaagcactgtgagagagtgccttatttacttagtgccgctggagaatctgctctcagccctgacgctgcttgtggcgcgggttgacgcagatcaccatgacgcggccgtgacggcggatcacgcggcagttttcgcagatcctcttcacgctagggctgaccttcatggttatccttttcttgtgtacctttacttgtaacggtacgtaatgcgtccgcggttcaggtcgtaagggctcatttcgagcacgacacgatcctgcggcagaatacgaatgtagttcttacgcattttgccggaaatcgtggcgagcacgatgtgcttgttttcgagttcaacgcggaacatcgcgttaggcagtgcttccacgacctgtccttcgacttcaatcacaccgtcttttgccatgtgcctctagtcctattccgttggatgattactatggcatatccgaagacacaccaactgtcaactatatacgcacatacccctgtacgaacactcggcgtgtcgcacaggggtatggaaacgttgatgtggtatttcggcatcactccggcttgttgcccgggctgccgaacctactactcgaggtggctgatgatacggccgctgatctcgtcgatgtcgccgacgccgttgaccacgacgagcaggccacgggcctcgtagatgtcgagcagcggagcggtttccttctcataggtctccaggcgcttggcgatggcctccggagtgtcgtcagcgcggccctgctcggcggcgcgcttcttcatacgctccagcagcacgtcgcgggcggcttcgagggccaccacgtggtcgagcggagtgtcgaggtcggcgagcatctcgtcgagagcggtgacctgggcggcgttacgcgggtagccgtcgaggatccagccgttcttgcagtcttccttggccagacgatccttgacgatcttgttggtcagggagtccggaaccagctcgcccttgtcggtgtagctcatcgcctcaaggccgagttcggtcttgttcttgatgttgtagcggaagatgtcgccggtggagatggtggggatgttgaagtgttcggcgagcagagcagcctgggtgcccttgcccacgccctgggggcccatgatgagcagacgcatggtggtctccttttatgtcggttattaatacggttttggctcccttggttaagggagccattgagttatatgcggaagaaagattgctccgtcgtggaacagtccactggactgttccactcctcgcgcggccgcctgcccattgcgggcgaccgctgccaagcgggcgtcagccctctttgtggtccacgttttcgaacaggaagccggtgtactggaactgttcggtctgggccttggcctggcgcagggtgtcgaggcccacgcccgcgatgatcaggatcgtggtaccaccgaacggcagcttggcgttgaggccgagggccatgatcagcacggtcgggatcagggccacgaacagcaggtagacggcgccgacggtgttgagtcggttcatcacgtaggtcaggtagcggctggtggcgttgccggcgcggatgccggggatgaagccgccgtactgcttcatgttgtccgcggtctcgtccgggttgaacgtgatcgaggtgtagaagaagcagaagaacacaatcatcagcgcgtacagcgcgatgtaccacacggaggtggtgttcgccaggttggcgttgatccacttgacccacgactggtcggacttgccgaactgggcgatcagggtcgggatggcgaggatcgaggaggcgaagatcggcgggatgacgccggacatgttgatcttcagcggcaggtaggtggaggagccgccgtacatcttacggccgatcatgcggcgcgtgtactgcaccgggacgcggcgctggcacagttcgacgaagtcgacgaagatgaggatgaccacgagcacgcccacgacgatgccgaacttcagccagtcgccatcggtgccgtcggtgccgtagccgatctcccacagctgcggcaggaagccggagcagatggacatgaagatcaagatggacatgccctggccgatgcccttgtcggtcacgagctcggccatccacatgatcaggccggtgccgccggtcatgatgaggaccatgaccacgaggttgaacacggagccgtccgggatgacctggtcgcactggtagttgaacagggcgccggagcgggcggtgaccaggatggtggtggactggagcacggccaggccgatggtcaggtaacgggtgtactgggtgagcttggcctcgccggactggccctccttgtgcagggcctcgaagcgggggatgaccacgcgcagcagctgcaccacgatggacgcggtgatgtacggcatgacgcccagcgcgaagatagacagctggagcatggcgccacccgagaagaggttcaccagtccgatgaagttctcctgggaggcgccgccgatcttggccatgcacttgttcacctctgtgtagtccacgccaggggtcggaatgaacgaaccgatgcggtagacgatgatgatgaacaggacgaagagaatcttcttcctcaactctttggtcttcagggcctggattagtgtcctcacctggatttcctcccaatagcgcgccaatcgcgcgaaatacacaaactaacgaacgagcatagtctaaagtgcctacttcggccacttcatgtctcgcgaatgttacctgaattatgctccgtcgtactgaacggggggaagcatactcaaaacgatcattgtgttgagactgcttctctgcactcagaacaacaattttttagaaaagggaacccccgtccacctattggcgggcgggggttgtacagcctattgcgctccccgtaggactaatcagtcctcggaaacggaaccgccggcggcctcgatcttggacttggcggaagccgaaaccttaacacccttgagggtgaaagccacggtggtctcgccgtcgcccagaaccttcaccggagcgttgtcacgaacagcgcccttggcgatcaggtcggccacagcaacctcgccgccctcggggaagagctccacgagacgagcgatgttgatgacctggaactcgaccttgaacgggttcttgaagccacgaagcttcggcaggcgcatgtacagcggcagctggccgccttcaaagcccggacgcacgtggttgcgcttcgtctggcccttggcgccacgaccggcggtcttacccttggagccttcaccgcggcccacacgggtgcggtccttcttggcacccggggcgggcttcaggtcgtgcatctgcaggatttcgttatctgccataatcagtcaacctcctcaacggtgaccaggtgacgcacggcgttcaccagaccacggttggccggggtgtcctcgcggacaacggtcttaccgatcttgttgaggccgagggtcttgacggtggcgcgctgagccggggtacggttcacgatgccgtggtgcagggtaatcttcaggttcttagccatgagtatcactcaccatccttctcttcggcggccttagcggcagcagcctcttcgcgagccttgcgagcctcggcaatgccggcggcgcgggcgcgcagcagagcatcgggagcgacctcgtcgagcgccaggccacgacgggcggcgatctcctcgggctcttcgagctgcttgagggcgtcgacggtagcgcgcaccacgttaacggcggtggcggagcccatcgacttggtcaggacgtcggtgatgcctgcgcattccatgacggcgcgcacggagccaccggcgattacaccggtacccggggcggccggacgcagcaggacggtgccagcagcgtcgtgaccctgaaccgggtgggtgatggtgccgcggacgcgaggcacagagaacatgtgcttcttggcgtccagctggcccttggcgatggcggccgggacttcacgggacttgccgtagccgacacccacggtgccgttgccgtcgccgaccacaaccagtgcggcgaagctgaaggtacggccacccttgtgggtcttggacacacggttgatggtcaccacgcgatcgagcagctcgtcgccgtggttttcttcacgacggttacgacgctcgccacgacggccttcaccgcgctggccacgacgacccttgcggtcctcgttgttggattcggtcgccacagtgttctgagtttcttcagccacttgggtttccttcgtttcgttgtcgctcacagtgcaagacctccctcgcgggcgccatcagcaacggctgcgacgcgaccggtgtacttgttgccaccgcggtcgaacacgactgcggtgatgccggcagccttggccttctcggcgatcagctcgccgaccttcttggcggcctcagtcttggtgccttcaaagccggcgaagtcggcctgaagagtggaggcagacaccagggtaatgcccttggtatcgtcgaccacctgagcaaccatgtgacggttggagcgggtgaccaccaggcgcggacgctcgggggtaccggagatgcgcttgcggatacgcgcgtgacggcgcttgagagctaccttcttgccttttccgagaatagcaacgctcatatcacttaccagcctttccagccttgcgcaggatgcgttcatcggagtacttgatgcccttgcccttgtagggttccggagcgcgcagcttgcggatgttggcggcaacctggcccacgacctgcttgtcggtgccttcgacaaccacgtggttggcgtcggtcaccttcagggtgatgccttcgggcgggttgacggtgatggtgtgggagtagccgaggaagaactcgatgccctggcccttggcgacggcgcggtaaccggtgccgacgatctcaagagtcttggagtagccatcgtgaacacccttgaccatgccggccatgatggaacgagccagaccgtgcttggcacgggtcggacgcaggtcatcagcggcggtcaggacaatctcgttgccttcaacggcagcggtgatgccttccggaaccacgtaggagtcagaacccttagcgcccttggcggagaagttctggccttcaatcttgacttcaacgccagcagggatggcgatggggagcttaccaatatgcgatgccatgtttcagctctcctttctcaccacacgaaggcgacaatttcgccgccaatgcctcggtcgaggcattccttctgagtcagcagtcccgaagaagtcgagatgatggcgatacccaggccaccgagcggcatcggcagggagtcggacttcgcgtaacgacgaaggcccggcttggagatgcgcttgataccctgaatggaacgctcaccgttcggaccgtacttgagggtgacctcaagagtctggccgaccttggcttccttagcggtgaagtccttgatgtagccttcacgcttcaggatctcggcgatgttcgccttgaacttggagtacggcatatccacggtttcgtgcttggccgcgctcgcattacgcagacgcgtaagcatgtctgcgatcggatctgtcattgtcatttgggcttgttgccctttctcgctatggtttccgccgccctcacgcttcttctagaagcgttcgggccgcggaccttcagcgtcgatgtttaccaactggacttcgtaacgccgggcagttcaccgcggtgagccttctcacgaaggcagatgcggcacaggccgaacttgcggtagacggagtggggacgaccgcagacctggcagcgcgtgtaagcgcggaccttgaacttcggcttgccggccgccttgttcttaagagcggtttttgccatatcagttctccttgaaggggaagccgaggtgcttcagcagcgcgtaagcttccttgtcgtccttggtggaggtcaccacagtgatgtccataccgcgcacgtgatcgatcgaatcaggatcgatctcgtggaacatggactgctcggtgagaccaaagttgtagttgccctggccatcgaactggtggccgttgatgccgcggaagtcgcggatacggggcagcgcgagggtcagcagacggtccaggaactcccacatgcggtcgccacgcagggtgacgtacgcaccgatggcctggccttcacgcaggtggaactgcgcgacggacttcttggccttggtgatcttcggcttctggccggtgatcagggtgaggtccttgacggcaccttcgatgagcttggagtcgcgggcagcggcaccaacacccatggagacgacgaccttctggacacgagcaacctgcatcgggttggagtacttgaactccttctcgagctcaggaatgatctgctcgttgtacttgaccttcaagcgcggggtggccggcgcttcgacagtagtatcggtcatgccagctcctttccggacttcttggcgacgcgcacgcgcacggtcttcaccttgccgtcacgcgcctcttccttaacggtgatgccaacgcgggtcggctgcttggtctccgggtcgatgaccatcacgttggagcgatggatcggagcctcagtggagacgatgccagcctgctggccctgctgcgttgcacgcacgtgcttcttgacgatctgcacgccttcgacgatcagtcgatcgttggagagcacctgcttgacggtgccttccttgccgcggtccttgccgcggatgaccttgaccaggtcgccgctcttgatcttggctgccatgtcagatcacctccggggcgagggacacgatcttcatgaacttgtgctcgcgcagttcacgaccgaccggtccgaagatacgagtgcccttcggttcacggccggagccgagaatgacggcggcgttctcgtcgaacttgatgtaggaaccatccgcacggcgggattccttgacggtacggacgacaacggccttaaccacgtcgcccttcttgaccgacccgccaggaatggcgtccttgacggaggcgacgatcacgtcgccgatgccggcatagcgtcgcttcgatccgccgagcacgcggatggcgaggagttccttcgcacccgtgttgtcggcgacatgaagccgcgtttcctgctgaatcattgattctccttagccgagctggttctccccatttaccggggcatcgtggttgcccataatgccccggtaaatggcgagccttgccgaactttacttacttggcgcgctcgataatggattcgagacgccagcgcttggtcttgctcagaggccgagtttccataatactcacgaggtcgccaatgtgggcgtcgttgtgttcatcatgggccttgaccttgctggtggaacgaacgaccttgccgtacagcgggtgggtcgaacgctgctcgagctcgacggtaatcgtcttgtccatcttgtcggacacgacgtagccgcggcgaaccttacggaagttacgctcttcagccataatcacttctccttggattcggtagcggccggctcctggctgatgccaagctcacgctcgcgaagcacggtgtacatgcgggcgatgtcgctcttgacagccttgagacgggcggtgttctcgagctgaccggtggcgtgctggaagcgcaggttgaacagctcttccttggacttcttcaagaagccttcgatttccgcgttggtcttctcgttgagattcttgatggagtaatcagcggtaccgactgccatcagatatcaccaccttcacgtgcgataatgcggcacttcatcgggagcttgtcgatagcgcggcggagggcttccttagcgatgtcctcggacacaccaccgatttcgaacatcacgcgaccagggcgcacgttcgcaatccagaactccggggcacccttaccggaacccattcgggcaccgagcgggtgcttggtcagcggacgatccgggaagatcgtgatccacacgcggccaccacgcttgatgtagcgggtcatggcgatacgcgcggcttcgatctgacggttggtcacgtaggccggggcgagggactggatggcgaaatcaccgaagttgatctcgttgccgcccttggacatgccagaacgcacagggcggtgctgcttgcggtacttagtcctcttggggataagcattcttgctcactccttcgtttctgcagccggagcggcctcggcgggagcctcagccttgggggcttcggcggcctgcggggcggcggaacggttgccacggcgcgggcggcgatcgccaccacgacggcccggacggttgttctgctgagcctgctgctcttcgaactcggattcggtcatgtcgcccttgtagatccagaccttgacgccgatacggccgtacgtggtcttggcctcgaagaagccgtaatcgatgagggcgcggagggtctgcagcggaacgcggccctcacggtagaactcggaacggctcatttccgcaccgccgaggcggccggagagcttgatgcggatacccttggcaccggcgcgcatggcgtcctgctgggccttacgcatggcacgacggaaggtgacgcggttggtcagctgctcagcgatgccctgagcgacgagctgggcgtccagcgcggcgttcttgacttcgaagatgttgagctggacctgcttgccggtcagcttctcgagcttggcgcggacgcgctcagcctcggcgccacgacgaccgatcacgatgcccggacgggcggtgtgaatgtcgacgcgaacgcggtcgcgggtgcgctcgatgacgatgcgggacacgccagcgcgctcgaggtccttgctcatctccttgcggatctgatcatcctcaagcacgaagtcgcggtagcgttcgccggccttgttggagtcggagaaccacttggagcggtggttctcagtgatgcccagacggtagccaaacggattgatcttctgacccatctttagcgggctccttccttgttagccacgacgaccgtgatgtgggaggtgcgcttgttgatgcgagcagcgcggccctgggcacgagcgcggaagcgcttgagggtcacaccttcgtcaacgtaggtctccttgatgtacaggtcgttctcgcggaacggctcgccggccttgtcggccttcacacgagcgttggcgatggcgctctccagggtcttgcggaccggcagggccgcagcctgaggggcgaacttcaaaatggtgacggcttcggtcgccttcttgccgcggatgaggtcgaccatgcggcgagccttgcgcggcgtcacgcggacgtgacgagcgattgctttagcttccatgttctattccttatccttagcgacgggccttcttgtcgtccttcacgtgacccttgaaggtcttcgtgggggcgaactcacccagcttgtgaccaaccatggcctcggtgacgaacaccgggacatgcttgcgaccatcatgaacggcgaaggtgtgtccgatgaaatcaggggtgatcatcgaacgacgggaccacgtcttgatgacgttcttggtgcccttctcgttctgctcgtcgactttcttctgcaagtgggcgtcgacgaaggggcccttcttgatgctacgagtcatcttctcgatactcccttacttgcggttcttgccggacggacggcgacgaacaatcatcttgttcgaagccttcttcggacgacgagtacgaacctcgcccttgccccacggggagaccggcggcttaccaccgcgggtacgaccgccgtgcgggtggtcgaccgggttcatggactcaccacgggtgatcggacggcggccgatccagcgggcgcggccagccttgccgagctgaatgttggcgtggtcctcgttgccgacctcgccgacggtagcgcggcagcgcgcgtcgacgttgcggatttcgccggacggcatacgcagctgagcgtaggcgccatccttggcgacgagctgaacggcagcaccagcggaacgagcgatcttagcgccgcccagcgggcggagctcgatggcatgaaccacggtaccggtcgggatgttcttcagcggcaggttgttgcccggcttgatatcagcctgagcaccggtctcgatgacgtcgccctgcttgatgcccttcggcgcgataatgtagcgcttctcgccatctgcgaagtgcaggagggcgatacgggcggagcggttcggatcgtactcgatctcggcaaccttggcgggcacgccgtccttgtcccaacgcttgaaatcgatgagacggtactgacgcttgtggccgccgccgcgatgacgggaggtgatacggccgtaagagttacgaccgccggtcttggacttcttgcgaaccagcgacttctcaggcgtagaacgagtcagctcggagaaatccgagacggacgcgttgcggcggcctgcggtcgtcggcttataaacgcggatagccataatgtagttcttcctttaacttttctcggctaaccttcagttaccaaagatgtcgatcgtctggccctcggcgacggtcacgatcgcacgcttctgggaagcgcgctggccgaaaccggtgcgagtgcgctgcttcttgccagcgcggttgagggtgttgacgttcgtcaccttgaccttgaagatctcttcgattgcctgcttgatctgcaccttgttcgcatccggagccaccacgaaggtgtactggccacggtcggaagcggcgtagctcttctcggagacgacgggcttaagaatcacgtcgtgagcgggcttgtgaatagcgaccatctaaatcaggcctccttcggctcggtcttggcagccacgaaagcctcgaaggcttccttggtgaagaccacgtactgcgaggtaatcacgtcgtacgtgttgagctgatcgacgaaaatcgggtgaacggtcgggatgttgcgcacggagagccactcgttgatgttgtcgcgagtgaagacgaccgtggtgaacttgtccgcggtgatcggggccagagcggcgacagcggccttggtggacggctcggtgataccgaactccaccacggcaacgcgaccggcgttggcgcgatcggacagggcgtagcgcagagctgcggccttcatcttcttgggggtgcgctgagagtagtcacgcggctgcgggccgaacacggtgccgccgtggtaccactgcggtgcacggatggagccctgacgagcacgaccggtgcccttctgcttccacggcttcttgccgccgccggaaaccatgccacgagtcttggtggcgtgggtgccctgacgagcagcagcgagctgagcggtgacaacctggtggatcagcgggatgtgagcctggacatcctcggcggaaacgccgaagagagcctcaggagcttcaacggtgccggtggcctggcccttggcgtcggtgacgttcagagtaacgtttgccatggtttatcaggctcccttcacagccgagcggacgagaacgatgccgcccttggggccaggaatggcgcccttgatggcgaggatgccgttctcgacatcagcggagacgacggtcaggttctgggtagtggcggtcacatgacccatgcggccggccatacgcttgcccttgagaatacggctcggagtggcgcatgcgcccacagaaccgggacggcgctcgttcttgtgagaaccgtgagtacggcggtaggacttgaagccccaacgcttgatggtaccggcgaagcccttacccttggtggtgccggtcacgtcgacctcagcaccctcttcgaacaggtcagcggccagttcctggccggcctcgaactgatcgacgtcgtcggtgcgcacctcgacgaggtggcgacgcggggtgacaccggccttggcaaagtggccagccagcggcttggtcaccttggtgggatcgatggcgccgtagccgagctggacagccttgtagccgtcagattcctcggtcttcacggcggtcaccacgttggtggacacgtcgacaagagtgacgggcacgaagaagccgttctcgtcccacacctgggacatgccgagcttcttgcccagcagagccttgcgattagacataatgcttcctcctcccttacagcttgatttcgatgttgacgtccgcaggcagatcgatgtgcatcagggagtccacggccttgggggtcgggtccacgatgtcgatgaggcgcttgtgagtgcgcatctcgaagtgctcgcgagaatccttgtacttgtgaggagaacggataacacagaagacgttcttctcggtcggcagcggaacggggccaacaacagttgcgcccgcgttcgtcaccgtttcgacgatcttcttcgccgattggtcgatgacctcgtggtcataggacttaagcctgatgcggattttctgtcccgccattgccgtccgccctttctagcgatgttcgttgtactgtttaccaacctgcttctagggcaccggcgcgcatggcctcccttggacatacgtcctctggcggtcatccgacatcagtgcgcggtttccggctgtcacttcacttgaagtggctcccggcccgcgctcgcttttttaattccaatttgcgagcccaaatcaggcaacttgtttattcaagcattgaggtgggacagtggagttcgcgcgtgtcgcgctcatgccgttcgtattacctcgcggcatagccgctcggcgtctgttcgattgtcgcaatgcaggtctcacatctttcttattgagaaccattcgctgcgatatcatgacagatatgacttcccgccgcaagactcttaaacgcgattggttcgacaaccaacctggcgcatgggtaatggttatgctgcccgctgtggctggcttctttatcggcgggcctaatcttgatacgctttggctattggcgacgtgggccgtgtgctattgcgtgcagttcagcgccgcgcactggttcaaagcacacttttcacgccgttatctgccgccgatgctcacttatgccgtagcgctcatcgtcatcggcttgccattcctgattacgcataccggcatactgcgttgggctcccttatatatagtgctggttgcgctgtcgatgctgtcctcgtggctgaggaaggagcgctcgctgtggggcaatgccgtgtcggtgattgccgcgtcggccatggccacggtgatcgcgtcgtttggcagcactgttgagacggcatgtgttatgcccatcaacgcagcacatgcctcgtgcgcagccgctgatgtcaccgccgcacgcaccgcgattcggaatatgccagatttgagccagatattcgaccttcacgcctggtggcccgcgggttcattgcccgtgagcgggctgattgccaccgtgctgtttgcgctgacgcagtatgggtcggttttggtggtcaaaaccatgatccgggaacgcgggaagtgttcatacgtggcggcttcgtgggtatggcatgtggcgctattgctgctagccgccgtgccgtctggacgcagtccgtatctgattgcgatgactgtgctgctgttggcccgcgccgttgcgttgccggtggttacacggcgcacaaccttgaagcccgtggtgaccggcattaccgaggcgtttgccagctttattgcttttggctgcataattgcggcgatttagcgacgcttcagcgat

SEQ ID NO: 705 - DNA, 1333 bp, Bifidobacterium longum
  source 1..1333: mol_type = genomic DNA
ggcctttcgctgtttggtgtgggtgagtgggtcgggggggtggtggtgctggtcgggtagtttgggggtatggataccacgtcgttgttcaccgccgccctgcaactgcctgacccgtggagggtgtcgggcgtggagttccgtgacgaggaggacggcagacgggaactgcatatcgcgatcgggttcgcggcgggttcgcggttcccctgcccggaaccggggtgcggcgaggccgcgtgtccggtgcatgacgcgagggagcgcgtgtggcggcatctgaacttcttccagtacaaggcgttcattcacgcgggcgtgccgcgcgtgacgtgccccgcccacggcgtgcacgcggtcccggtgccgtgggcgaggccgggaagcgggttcacgctcctgttcgaggcgatggtcgtggagctggccaaaagccagccggtcgcggacatcgccgagcaggtcggcgaacatgacacccgcctgtggcggttcatccgccattacgtggacgaggcgaggctttacgaggactacacgggcgtggaggccataggcatcgacgagaccagccggaagggccaccggtacatcaccgtggtcgccgacctggtggagcgcaacgtaatctgcgtggtcccgggcaaggactcgaccacgatcaaacggttcgcgcgggatttcatggatcacaacggcgatcccgaccgggtgcgtctggttacctgcgacatgagcctggggttcgccaagggcatccgcgagcggctgcccaacgcggcgagaatcatcgacaagttccacgtgatcaaacacgccaacgaggccgtcgacaaggtccgcaaacaggaggcccgcggcaacgcgctgctcaagcggaccaagtacctgtggttgaggaacgaatcgaacctgaccggcctgcaattggaaaccaagcgcagcctgcaacggcgacgattgaaaaccggacgcgcctgtcagatgcgcgagaccctccaggacatctacgacaccagcgccgatcgagccgaggccgagacggccctcaagcgtctgtgctcgtggatgacgcgctcccgactcgaacccatgaaagagttcgcccgccagatacgccgccactggcgggacatcctcgcctacttcgaccacccctacaccaacgcgatcctcgaaggactcaacagcgtcatccagaacgtcaagacccgagcccgcggattcaagaacatgggctacttcagcaccatgatctacctgacctgcggcaaactcgacctcagcaccgtcaccacctgacagacccacccacaccaaacagcgaaaggcc
